(19) United States
(12) Patent Application Publication
(10) Pub. No.: US 2009/0222932 A1
(43) Pub. Date: Sep. 3, 2009

(54) ALZHEIMER'S DISEASE ANIMAL MODEL, METHOD FOR OBTAINING SAME AND USES THEREOF

(75) Inventors: Fernando Valdivieso Amate, Madrid (ES); Lluis Montoliu Jose, Madrid (ES); Julio Pozueta Larios, Madrid (ES)

Correspondence Address: MOORE & VAN ALLEN PLLC, P.O. BOX 13706, Research Triangle Park, NC, 27709, US

(73) Assignees: UNIVERSIDAD AUTONOMA DE MADRID, Madrid (ES); CONSEJO SUPERIOR DE INVESTIGACIONES CIENTIFICAS, Madrid (ES)

(21) Appl. No.: 12/095,887

(22) PCT Filed: Dec. 1, 2006
(86) PCT No.: PCT/ES2006/000673

§ 371 Date: Apr. 24, 2009

(30) Foreign Application Priority Data
Dec. 2, 2005 (ES) P200503002

(51) Int. Cl. A61B 10/00; C12N 15/12; C12N 15/85; C12N 5/10; A01K 67/027

(52) U.S. Cl. 800/3; 536/23.5; 435/320.1; 435/325; 800/14; 800/18; 800/12

(57) ABSTRACT

The invention relates to a transgenic non-human animal which can be used as a non-human animal model for studying Alzheimer's disease (AD) and which is characterized in that: it contains a heterologous polynucleotide (transgene) which is inserted in the genome thereof and which comprises the nucleotide sequence of the complete human APP gene together with the regulatory sequences thereof; and it has an endogenous expression pattern similar to that of the hAPP gene in humans. The inventive model can be used to study AD and in the screening of potentially-useful compounds for the prevention and/or treatment of AD.

### FIELD OF THE INVENTION

[0001] The present invention is comprised within the biotechnological and pharmaceutical sectors: the invention specifically relates to the development of transgenic non human animals for their use as a non-human Alzheimer's disease animal model and uses thereof.

### BACKGROUND OF THE INVENTION

[0002] In 1907, Alois Alzheimer described for the first time a neuropathological syndrome characterized by dementia and a progressive deterioration of cognitive abilities. He was also the first to demonstrate the relationship between losses in cognitive memory, neuropathological lesions observed in autopsy and the medical history of the patient. The clinical characteristics of Alzheimer's disease (AD) are a progressive loss of memory, language (aphasia), motor abilities (apraxia) and perception (agnosia), accompanied by hallucinations, depression, disorientation and aggressive behavior.

[0003] Two neurological observations carried out by Alzheimer are currently used to describe AD: (i) neurofibrillary tangles, a dense and fibrillar skein which is found inside amorphous neurons, the main subunit of which is the microtubule-associated protein Tau, and (ii) senile plaques, extracellular plaques the major component of which is a peptide called β-amyloid (Aβ) from a precursor protein called β-amyloid peptide precursor protein (APP).

[0004] The human APP gene is located in chromosome 21 in the 21q21.3 region. It is formed by 18 exons distributed throughout 300 kilobases (kb). Its expression is not limited to a specific tissue but is expressed in many cell types and tissues, including the endothelium, the glia and neurons in the brain. Messenger RNA (mRNA) can mature, experiencing an alternative method for producing three major isoforms, which are named according to the number of amino acids forming them (APP₇₇₀, APP₇₅₁ and APP₆₉₅). The longest isoform is APP₇₇₀, containing the complete gene sequence; isoform APP₇₅₁ is the most abundantly and ubiquitously expressed isoform; and isoform APP₆₉₅ is the main isoform in the brain, the ratio between the 3 mRNAs in the cortex being APP₇₇₀:APP₇₅₁:APP₆₉₅, 1:10:20, therefore isoform APP₆₉₅ has been the most studied isoform in relation to AD.

[0005] Different mutations in the APP gene which were responsible for the development of AD were discovered between 1990 and 1992, it being possible to verify that the transmission was autosomal dominant with a penetrance of almost 100%. In 1995, two other genes related to AD were discovered, the genes called presenilin 1 (PS1) and presenilin 2 (PS2).

[0006] AD can be divided into two types based on its origin:
[0007] (i) Familial Alzheimer's disease (FAD), linked to mutations in the APP, PS1 and PS2 genes, which has a very early age of onset and is responsible for approximately 1% of Alzheimer's patients; and
[0008] (ii) Sporadic Alzheimer's disease (SAD), with a late onset (normally after 60 years of age) and an uncertain origin (it seems that the predisposition to suffer the disease is determined by a series of susceptibility genes and environmental factors, which makes it a complex and multifactorial disease, the main risk factors being old age and the existence of a family history); SAD is responsible for approximately 99% of Alzheimer's patients.

[0009] Both diseases (FAD and SAD) cannot be distinguished by the clinical symptoms and by neuropathology.

[0010] As is known, the development of experimental neurological disease models is very important for biomedical research. The development of models closely resembling the characteristics of neurodegenerative diseases in human beings has entailed a great methodological progress. In the case of AD, the main progress has been associated to identifying the proteins involved in FAD.

[0011] Several mutations linked to FAD in the APP gene were discovered at the start of the 90s decade, which, together with the progress obtained in transgenesis technology, revolutionized the possibilities of developing models for studying AD. By means of transgenesis, the pathogenic forms of the APP gene have been able to be expressed in a reproducible and more suitable manner in the different regions of the brain, thus generating a great verity of transgenic mice expressing wild APP, APP fragments, mutated APP protein and other AD-related genes.

[0012] The models developed in mice for AD include the following:

[0013] NSEAPP: a construct with the neuron-specific enolase (NSE) promoter and the APP gene isoform 751 cDNA was prepared in order to generate this mouse. The overexpression of this construct led to the occurrence of diffuse Aβ plaques at the age of 22 months. These plaques had a more mature appearance, which was reminiscent of the plaques found in Alzheimer's patients, in only 5% of the mice and were positively stained for Bielschowsky and thioflavin-S stains.

[0014] APP YAC: the use of yeast artificial chromosomes (YAC), as a carrier for generating transgenic mice, in which large amounts of DNA could be inserted, led three groups to almost simultaneously publish the generation of a transgenic mouse with a 650 kb YAC (B142F9 Washington University YAC library) including the entire APP gene encoding region and large regions at both 3′ and 5′ of said gene. In those mice, an expression of the human gene was achieved that was similar to that of the endogenous expression in mice, without observing the formation of plaques or neurofibrillary tangles. Human genome sequencing showed that the YAC used to generate these mice, in addition to the APP gene, contained the gene encoding the GABPA transcription factor, which could generate an unwanted phenotype.

[0015] PDAPP: this transgenic mouse, described in 1995, was the first mouse to develop a great variety of AD neuropathologies and was obtained using a construct whereby the APP gene cDNA, containing the “Indiana” V717F mutation, was overexpressed; neuritic plaques, surrounded by dystrophic neurites, astrocytosis, microgliosis and synaptic loss could be observed in the brain of the mice, but neurofibrillary tangles were never observed. The presence of plaques reached 50% occupancy in the cortical area regions, a very high percentage if it is compared to that of Alzheimer's patients, which tends to be between 6% and 12%. In spite of this large load of plaques in the brain, neurodegeneration has not been demonstrated in these mice.

[0016] Tg2576: this mouse, described in 1996, is possibly the model that has been most used to study AD; the transgene is formed by the prion protein promoter, which ensures a high expression in the brain, and with isoform APP₆₉₅ cDNA, containing the “Swedish” K670N/M671L mutation on a genetic C57BL/6J//SJL background. Tg2576 mice have human APP (hAPP) expression levels that are 5.6 times the endogenous expression levels of mice in the brain. At the age of 9-12 months, they already had neuritic plaques in the entorhinal region, later extending to the hippocampus and cortex.

[0017] APP23: this new murine model for studying AD was generated in 1997 using the Thy1 promoter and overexpressing hAPP₇₅₁ cDNA with the “Swedish” K670N/M671L mutation, whereby an expression of more than 7 times the endogenous expression was achieved, which caused the occurrence of plaques at the age of 6 months. The most important characteristic of these mice is that neuronal death in the CA1 region of the hippocampus at the age of 14-18 months was at last described. Another important characteristic of this model is the development of a cerebral amyloid angiopathy, making it a good model for studying AD. The behavioral analyses of these mice have shown that there is a wide variability in the results with significant differences in learning from the age of 18 months.

[0018] The animal models generated to date have not been able to generate all AD pathologies. The generation of these models has been based on the overexpression of the APP protein, either wild or with FAD-linked mutations, which limits such models to studying FAD, since they start from a situation which does not occur in SAD patients. The occurrence of amyloidogenic plaques in mice brains, occupying from 20 to 50% of brain regions, has been described in these models, whereas the presence of plaques does not exceed 12% in human patients.

[0019] In the model set forth herein, human APP YAC mice “hAPPy”, an APP gene expression has been achieved that is very similar to the endogenous expression of mice, as described in previous works carried out with APP YAC (Buxbaum, J. D., et al. (1993). “Expression of APP in brains of transgenic mice containing the entire human APP gene.” Biochem Biophys Res Commun 197(2): 639-45; Lamb, B. T., et al. (1993). “Introduction and expression of the 400 kilobase amyloid precursor protein gene in transgenic mice [corrected].” Nat Genet. 5(1): 22-30; Pearson, B. E. and T. K. Choi (1993). “Expression of the human beta-amyloid precursor protein gene from a yeast artificial chromosome in transgenic mice.” Proc Natl Acad Sci USA 90(22): 10578-82), with the difference that in “hAPPy” mice, the presence of the GABPA gene, which was previously in YAC, has been eliminated (Lamb, B. T., et al. (1997). “Altered metabolism of familial Alzheimer's disease-linked amyloid precursor protein variants in yeast artificial chromosome transgenic mice.” Hum Mol Genet. 6(9): 1535-41.). Suitable APP gene expression and possible responses in its expression due to external stimuli are essential for generating an AD model.

[0020] In spite of the efforts made to date and of having generated many AD-related neuropathologies, and even understanding FAD better, the obtained models are so far from reality that it is difficult to use them to understand the causes of SAD or the development thereof. For this reason, there is still a need to provide an AD animal model overcoming the drawbacks of existing models.

[0021] Human APP protein expression and consequently, human AP peptide expression make the formation of amyloid plaques possible in this model due to the fact that the murine protein cannot form them due to the differences in its sequence. The application of different environmental or pathogenic factors to “hAPPy” will thus allow a correct response of the APP gene and will allow the formation of amyloid plaques. The possibility of applying these environmental factors to the model, which factors are considered to a great extent responsible for the disease, makes it a very important tool for studying SAD.

### BRIEF DESCRIPTION OF THE DRAWINGS

[0022] FIG. 1 shows the location of the APP gene in human chromosome 21 (NCBI build 35). The SeqB area excludes the entire GABPA gene encoding region but starts within its 3′ UTR region.

[0023] FIG. 2 shows the chromosomal location of the APP gene; A. Position of the human APP gene in chromosome 21, next to the adjacent genes noted down in ENSEMBL. B. Position of the murine APP gene in chromosome 16, next to the adjacent genes noted down in ENSEMBL.

[0024] FIG. 3 shows a homology matrix of the human and murine APP gene sequences. A human chromosome 21 sequence megabase including the human APP gene is compared with a chromosome 16 megabase, in which the murine APP gene is also included.

[0025] FIG. 4 shows a diagram of the PCRs of the APP gene environment. The position of the PCRs is used to delimit the size of YAC b142f9, both at 5′ and at 3′ of the gene, with its closest approximate distance to the gene encoding region.

[0026] FIG. 5 shows a diagram indicating the demarcation of the YAC b142f9 extension by means of PCR. 1% agarose gel, with the PCRs of sequences A, B, 1 and 2. Lane 1 corresponds to the molecular weight marker. For each sequence, the negative control, YAC, and the positive control, respectively, are shown B. 1% gel, with the PCRs of sequences 3, 4, 5 and 6. Lane 1 corresponds to the molecular weight marker. For each sequence, the positive control, YAC, and the negative control, respectively, are shown.

[0027] FIG. 6 shows a diagram of the steps followed in the generation and linearization of the recombination plasmid pB1R Seq 2.

[0028] FIG. 7 shows a diagram of the steps followed in the generation and linearization of the recombination plasmids pYAC4 3′Seq A and pYAC4 3′Seq B.

[0029] FIG. 8 shows the PCR of Exons 6 and 11 as well as of sequence 2′. PCRs of exon 6, exon 11 of the APP gene and sequence 2′ of several analyzed yeast clones. M, molecular weight marker; G, genomic DNA; c+, positive control and c−, negative control.

[0030] FIG. 9 shows the separation of yeast chromosomes by means of PFGE and hybridization with APP gene cDNA. A. PFGE stained with ethidium bromide. B. Membrane hybridized against APP gene cDNA. lanes: M molecular weight marker, YAC b142f9, AB1380 (YAC-free yeast), clone 13, clone 14, clone B7.

[0031] FIG. 10 shows a Southern Blot of the 5′ region of YAC b142f9 and of clone 14. Differences in the Southern blot band pattern between the original clone b142f9 (APP) and clone 14.

[0032] FIG. 11 shows a comparative Southern Blot of YAC b142f9 and of clone 14. Both the DNA of clone B142F9 and of clone 14 was digested with the Bam HI enzyme. Separated in an agarose gel and hybridized with APP gene cDNA. M, molecular weight marker; APP, clone B142F9; 14, clone 14. On the right-hand side, B. Band pattern obtained after digesting the 300 kb of the APP gene with Bam HI, the fragments containing any gene encoding region are shaded.

[0033] FIG. 12 shows the scheme provided for the fragmentation of YAC b142f9 by means of two successive rounds of homologous recombination in yeasts.

[0034] FIG. 13 shows the dual PCR analysis of clone b106. PCR carried out on different clones, both of SeqA and of SeqB. The first PCR was carried out on exon 6 of the APP gene, whereas the second PCR was carried out on the GABPA gene. The clones positive for the first PCR and negative for the second PCR are indicated with an asterisk. C+, positive control; C−, negative control.

[0035] FIG. 14 shows the PCR analysis of the recombination environment. PCR diagram, the shaded mark indicates the place of SeqB. B. PCRs of the GABPA gene, exon 11, exon 6 of the APP gene, Seq A′ and Seq A. Each PCR has three lanes, corresponding to the positive control, clone b106 and negative control.

[0036] FIG. 15 shows the hybridization of PFGE compared to APP gene and GABPA gene cDNA. A. PFGE gel stained with ethidium bromide. 1. Marker. 2 and 5 b142f9. 3 and 6 clone 14. 4 and 7 clone b106. B. Hybridization of lanes 1-4 with APP gene cDNA. Hybridization of lanes 5-7 with GABPA gene cDNA.

[0037] FIG. 16 shows the Southern blot diagram and gel of the recombination in 3′. A. Southern blot diagram of the recombination in 3′, the original YAC in the upper area and the recombined YAC in the lower area. The shaded square in front of Reco B shows the location of the probe used. B. Southern blot of the digestions with Eco RI and Sca I of the three YACs, b142f9(APP), clone 14 and clone b106.

[0038] FIG. 17 shows a comparative Southern blot of clones b142f9, 14 and b106. Comparative Southern blot of YACs b142f9(APP), clone 14 and clone b106, digested with Bam HI and hybridized with an APP gene cDNA probe. The band pattern is conserved between the three YACs. M, marker.

[0039] FIG. 18 shows the PFGE of the extraction of YAC b106. Extraction of the band corresponding to YAC b106. The sides were stained first to determine the position of the YAC in the gel. The piece of agarose corresponding to YAC b106 is missing in the central part.

[0040] FIG. 19 shows a diagram of the PCRs used to analyze founder mice.

[0041] FIG. 20 shows the representative PCRs of the founder mice. Sample of 23 PCRs carried out on transgenic mice, those carried out on mice 2, 12, 35, 37, 41 and 46 are shown, c− negative control, c+ positive control.

[0042] FIG. 21 shows an illustrative PCR of several offspring of mouse 35 and the transmission of the APP gene to the germ line. Image of the 4 PCRs carried out on the first seven offspring of mouse 35. PCRs of TRP 1, exon 6, exon 11 and LYS 2 were carried out. It can be observed that offspring 1, 4, 5 and 7 have inherited the transgene.

[0043] FIG. 22 shows a comparative Southern blot of F1 of the founder mice. Fingerprint of mice 35 and 64, compared to their non-transgenic litter siblings. A band pattern identical to that obtained for YAC b106 can be observed.

[0044] FIG. 23 shows a bar chart showing human APP gene expression. Logarithmic representation in relative units of human APP gene expression in line 35.97% confidence interval. A high expression in central and peripheral nerve tissue is detected. Lower levels in testicles, blood, heart and kidney.

[0045] FIG. 24 shows a bar chart showing murine APP gene expression. Representation in relative units of murine APP gene expression in mice. The graph has been standardized against the expression in spleen (the lowest expression), using a 95% confidence interval. The legends indicate the tissue that each bar corresponds to.

[0046] FIG. 25 shows the APP protein expression and assessment. A. Representative gels of the western blot analysis for APP protein and actin. Tissues: 1 cortex, 2 ventricles, 3 cerebellum, 4 mesencephalon, 5 spinal cord, 6 liver, 7 lung, 8 pancreas, 9 spleen, 10 small intestine, 11 muscle, 12 testicles, 13 heart and 14 kidney. B. Graphic representation of the APP levels. Blue bar, wild mice and red bar, transgenic mice. Tissues: 1 Cortex, 2 Ventricles, 3 Mesencephalon, 4 Cerebellum and 5 Spinal cord.

[0047] FIG. 26 shows the histological analysis of transgenic mice of line 35. Congo red staining of mice brains. A Cortex of wild mice. B Bippocampus of wild mice. C Cortex of line 35. D Hippocampus of line 35. E Hippocampus of a 1-year-old Tg2576 mouse, where amyloidogenic plaques are observed.

[0048] FIG. 27 shows the histological analysis of transgenic mice of line 64. Congo red staining of mice brains. A Cortex of wild mice. B Hippocampus of wild mice. C Cortex of line 64. D Hippocampus of line 64. E Hippocampus of a 1-year-old Tg2576 mouse, where amyloidogenic plaques are observed.

### DETAILED DESCRIPTION OF THE INVENTION

[0049] The present invention generally relates to a transgenic non-human animal which can be used as a non-human animal model for studying Alzheimer's disease (AD). Said transgenic animal is characterized in that it contains a heterologous polynucleotide (transgene) which is inserted in the genome thereof and which comprises the nucleotide sequence of the complete human APP gene (hAPP) together with the regulatory sequences thereof, said transgene lacking other genes present in the natural environment of the hAPP gene, such as the GABPA, ATPJ and CYYR1 genes, and in that the expression of said transgene has an endogenous expression pattern in the transgenic animal similar to the endogenous expression pattern of this same hAPP gene in humans. As used herein, the expression “endogenous expression pattern of the hAPP transgene in the transgenic animal similar to the endogenous expression pattern of the hAPP gene in humans” or the like relates to the fact that the transgenic animal containing said hAPP transgene expresses the hAPP gene in the same tissues as the hAPP gene is expressed in humans and in substantially the same proportion.

[0050] The fact that the transgenic non-human animal provided by this invention contains a transgene containing only the complete hAPP gene together with the regulatory sequences thereof, without the interference of other genes present in the natural environment of the hAPP gene (e.g., the GABPA, ATPJ and CYYR1 genes) which may interfere with its expression, allows an expression of said transgene in the transgenic animal with an endogenous expression pattern similar to the endogenous expression pattern of the hAPP gene in humans (i.e., it reproduces the situation in humans with considerable reliability), therefore said transgenic animal can be used as a non-human animal model for studying AD, its evolution and development, as well as for studying the factors and stimuli causing it and for identifying potentially useful compounds for the prevention and/or treatment of said disease.

[0051] Therefore, in one aspect, the invention relates to an isolated polynucleotide, hereinafter polynucleotide of the invention, consisting of the nucleotide sequence comprised between nucleotide 26,064,934 and nucleotide 26,642,665 of human chromosome 21 (NCBI35:21:26064934:26642665:1) or a fragment of said polynucleotide comprising the complete hAPP gene together with the regulatory sequences thereof. Said polynucleotide contains the nucleotide sequence of the complete hAPP gene together with the regulatory sequences thereof, and, flanking the ends of said nucleotide sequence of the hAPP gene, respective adjacent regions comprising unique recombination sequences, which can be used in the isolation of the nucleotide sequence of the complete hAPP gene together with the regulatory sequences thereof.

[0052] In a particular embodiment, the complete hAPP gene together with the regulatory sequences thereof is comprised between nucleotide 26,174,733 and nucleotide 26,464,809 of human chromosome 21 (NCBI35:21:26174733:26464809:1).

[0053] In another particular embodiment, the polynucleotide of the invention consists of the nucleotide sequence comprised between nucleotide 26,064,934 and the nucleotide 26,573,344 of human chromosome 21 (NCBI35:21:26064934:26573344:1). Said polynucleotide comprises the nucleotide sequence of the complete hAPP gene together with the regulatory sequences thereof flanked by regions containing at least one unique recombination sequence.

[0054] Therefore, in another particular embodiment, as shown in FIG. 1, said hAPP gene is flanked at its 5′ end (in relation to the origin and the direction of the APP gene transcription) by a first nucleotide sequence and at its 3′ end (in relation to the end and the direction of the APP gene transcription) by a second nucleotide sequence, wherein:
[0055] said first nucleotide sequence consists of the nucleotide sequence comprised between nucleotide 26,464,810 and nucleotide 26,642,665 of human chromosome 21 (NCBI35:21:26464810:26642665:1), or a fragment thereof comprising at least one unique sequence, and
[0056] said second nucleotide sequence consists of the nucleotide sequence comprised between nucleotide 26,064,934 and nucleotide 26,174,732 of human chromosome 21 (NCBI35:21:26064934:26174732:1), or a fragment thereof comprising at least one unique sequence.

[0057] In a specific embodiment, said first nucleotide sequence comprises the nucleotide sequence comprised between nucleotide 26,464,810 and nucleotide 26,573,344 of human chromosome 21 (NCBI35:21:26464810:26573344:1), or a fragment thereof comprising at least one unique sequence, and said second nucleotide sequence comprises the nucleotide sequence comprised between nucleotide 26,064,934 and nucleotide 26,174,732 of human chromosome 21 (NCB135:21:26064934:26174732:1), or a fragment thereof comprising at least one unique sequence.

[0058] The (unrepeated) unique sequences comprised in the aforementioned first and second nucleotide sequences can be used to isolate from its environment the complete hAPP gene together with the regulatory sequences thereof by means of homologous recombination, as described in the examples enclosed herein. Said unique sequences can be identified according to processes described in the state of the art and known by persons skilled in the art. By way of illustration, said processes generally include public biocomputer resources such as the RepeatMaster program [http://woody.embl-heidelberg.of/repeatmask/; Chenna Ramu et al., (2000) cgi-model: CGI Programming Made Easy with Python. LINUX Journal, July, 142-149; Smit, A F A and Green, P. RepeatMasker at http://repeatmasker.genome.washington.edu/cgi-bin/RM2_req.pl); Jurka, J. 2000 Repbase Update: a database and an electronic journal of repetitive elements. Trend in Genetics 16(9): 418-420)].

[0059] In a particular embodiment, said first nucleotide sequence comprises a unique sequence comprised between nucleotide 26,571,876 and nucleotide 26,573,344 of human chromosome 21 (NCBI35:21:26571876:26573344:1), referred to as Seq 2 in the present invention.

[0060] In another particular embodiment, said second nucleotide sequence comprises a unique sequence comprised between nucleotide 26,064,934 and nucleotide 26,067,221 of human chromosome 21 (NCBI35:21:26064934:26067221:1), referred to as SeqB in the present invention.

[0061] The person skilled in the art understands that any unique sequence comprised within said first and second nucleotide sequences flanking the ends of the complete hAPP gene together with the regulatory sequences thereof can be used for the same purpose (isolating the complete hAPP gene and the regulatory sequences thereof from their environment). Therefore, the present invention is not only limited to those unique sequences described herein (forming a particular embodiment of the present invention) but also include all those unique sequences comprised within said first and second nucleotide sequences, which can be located by means of the biocomputer tools known by the persons skilled in the art and forming part of the state of the art.

[0062] The polynucleotide of the invention can be contained inside a suitable vector. Therefore, in another aspect, the invention relates to a vector, hereinafter vector of the invention, comprising a polynucleotide of the invention. Said vector therefore contains the nucleotide sequence of the complete hAPP gene together with the regulatory sequences thereof, flanked by unique sequences as described in the present invention. The choice of the vector will depend on the host cell in which it will subsequently be introduced. By way of example, the vector in which said polynucleotide is introduced can be a yeast artificial chromosome (YAC), a bacterial artificial chromosome (BAC) or a P1-derived artificial chromosome (PAC). Therefore, in a particular embodiment, the vector of the invention is selected from the group consisting of a YAC, a BAC or a PAC depending on the guest cell to be transformed.

[0063] In a particular embodiment, when the cell in which the vector of the invention is to be introduced is a yeast, the vector of choice will be a YAC, which will contain all the suitable structural elements to carry out its function, such as a telomere, a centromere, an autonomous replication sequence and an auxotrophic selection marker in each arm. The examples enclosed herein describe obtaining a YAC having the aforementioned structural elements which is used to transform yeast cells.

[0064] In another particular embodiment, when the cell in which the vector of the invention is to be introduced is a bacterium, then the vector of choice will be a BAC, in which the necessary minimum elements will be a replication origin and genes controlling the number of copies and the BAC splitting.

[0065] The characteristics of the YAC, BAC and PAC are known by the person skilled in the art. Detailed information on said types of vectors has been provided, for example, by Giraldo and Montoliú [Giraldo, P. & Montoliu L., 2001 Size matters: use of YACs, BACs and PACs in transgenic animals, Transgenic Research 10(2): 83-110].

[0066] Therefore, in a particular embodiment, the invention relates to a vector useful for transforming yeasts comprising a polynucleotide of the invention flanked at one of its ends by a third nucleotide sequence and at the other end (opposite end) by a fourth nucleotide sequence, wherein:
[0067] said third nucleotide sequence comprises (i) a telomere functional in yeast cells and at least (ii) one auxotrophy selection marker, and
[0068] said fourth nucleotide sequence comprises (i) a centromere functional in yeast cells, a telomere functional in yeast cells and at least one auxotrophy selection marker.

[0069] Virtually any telomere and centromere functional in yeasts can be used in the present invention. Illustrative, non-limiting examples of said telomeres and centromeres functional in yeasts include those described in the examples enclosed herein.

[0070] Likewise, virtually any auxotrophy selection marker can be used in the present invention. Illustrative, non-limiting examples of said auxotrophy selection markers include TRP1, LEU2, LYS2, HIS3, HIS5, TRP1 and URA3.

[0071] The vector of the invention can be obtained by conventional methods known by persons skilled in the art [Sambrok et al., 1989 “Molecular cloning, a Laboratory Manual”, 2nd ed., Cold Spring Harbor Laboratory Press, N.Y. Vol 1-3].

[0072] The vector of the invention can be used to transform eukaryotic cells, such as yeast cells, Saccharomyces cerevisiae, for example, or prokaryotic cells, such as bacteria, Escherichia coli, for example.

[0073] Therefore, in another aspect, the invention relates to a cell, hereinafter cell of the invention, comprising a polynucleotide of the invention, or a vector of the invention. The cells can be obtained by conventional methods known by persons skilled in the art [Sambrok et al., 1989 “Molecular cloning, a Laboratory Manual”, 2nd ed., Cold Spring Harbor Laboratory Press, N.Y. Vol 1-3].

[0074] The described polynucleotides, vectors or cells of the invention can be used to obtain a transgenic non-human animal having, inserted in the genome thereof, the nucleotide sequence of the complete hAPP gene together with the regulatory sequences thereof.

[0075] Therefore, in another aspect, the invention relates to a transgenic non-human animal, hereinafter transgenic non-human animal of the invention, containing a polynucleotide of the invention inserted in the genome thereof. As a result, the transgenic non-human animal of the invention has an endogenous expression pattern of the hAPP gene similar to the expression pattern that this same hAPP gene has in humans. Although no link to any theory is desired, it is believed that this is mainly due to the fact that it is regulated by its own regulatory sequences. This allows the hAPP gene expression in the transgenic non-human animal of the invention to be induced by the same factors inducing its expression in humans, making it an animal model which reliably reproduces the phenomena and characteristics of AD occurring in humans.

[0076] In a particular embodiment of the invention, the transgenic non-human animal of the invention is a mammal, preferably a rodent, more preferably a mouse or a rat.

[0077] The transgenic non-human animal of the invention can have any genetic background of those known in the state of the art by a person skilled in the art, i.e., said transgenic non-human animal can come from a wild-type (wt) animal or from a non-human animal with a genetic background incorporating any molecular marker that is directly or indirectly related to AD. Therefore, in a particular embodiment, the transgenic non-human animal of the invention can express, in addition to the hAPP gene, one or more genes that are directly or indirectly related to the development of AD. Virtually any molecular marker that is directly or indirectly related to the development of AD can be used. Illustrative, non-limiting examples of said genes recognized as molecular markers of AD include presenilin 1 (PS1) gene, presenilin 2 (PS2) gene and the ε4 allele of the Apolipoprotein E (APOE) gene.

[0078] Therefore, in a particular embodiment, the genome of the transgenic non-human animal of the invention contains, in addition to a polynucleotide of the invention, one or more molecular markers of AD. By way of a non-limiting illustration, said molecular marker of AD is selected from the group consisting of the PS1, PS2 genes, and the epsilon4 (ε4) allele of the APOE gene.

[0079] Other genetic factors related to the predisposition to develop AD include the α₂-macroglobulin gene, the very low density lipoprotein receptor gene, the gene of the lipoprotein receptor-related protein LRP, of the Tau protein, of butylcholinesterase K, of cathepsin D, of interleukin and of choline acetyltransferase.

[0080] The genetic background of the non-human mice of the present invention can additionally comprise allelic variants, mutations and polymorphisms of said molecular markers of AD.

[0081] The presence in the genome of the transgenic non-human animal of the invention of the nucleotide sequence of the complete human APP (hAPP) gene together with the regulatory sequences thereof allows said gene to be expressed with an endogenous expression pattern similar to the expression pattern that this same gene has in humans, said transgenic animal can therefore be used as a transgenic non-human animal model for studying AD. As indicated above, the transgenic non-human animal of the invention can also have, if desired, additional molecular markers of AD. All of this allows studying not only AD in general, but also different variants of Alzheimer's disease, such as FAD and SAD.

[0082] Therefore, in another aspect, the invention relates to the use of the transgenic non-human animal of the invention in studying AD. In a particular embodiment, AD is selected from FAD and SAD.

[0083] In another aspect, the invention relates to the use of a transgenic non-human animal of the invention as an AD model for studying the etiology of the disease, the causes, the triggering factors, the environmental and/or physiopathological aggressions or insults leading to the establishment of the disease.

[0084] Illustrative, non-limiting examples thereof include age, cranial trauma, female gender, the action of pathogens such as herpes type (HSV1) viruses and bacteria, bacteria, e.g., Chlamydia pneumoniae, etc., the accumulation of aluminium, zinc type metals in the brain, etc.

[0085] In another aspect, the invention is aimed at the use of a transgenic non-human animal of the invention for screening, discovering, identifying, evaluating and validating potentially useful compounds for the treatment and/or prevention of AD. Said compounds can be compounds of any nature, for example, a chemical, biological, microbiological compound, etc., isolated or mixed with one or more different compounds, and includes compounds with a known or unknown composition and structure, pharmaceutical products with any known therapeutic application, biological products, microbiological products, etc., for example, organic or inorganic chemical compounds, peptides, proteins, nucleic acids, extracts, etc.

[0086] The transgenic non-human animal of the invention, e.g., a mouse, can additionally be used by means of crossing it with other non-human animals of the same species to obtain non-human animals having the genotype and phenotype characteristics of their progenitors. Examples of non-human animals which can be crossed with the non-human animal of the invention include:
[0087] knock-out non-human animals for the APP gene, or other genes directly or indirectly related to AD;
[0088] non-human animals expressing allelic variations, polymorphisms or mutations in genes involved in AD, or
[0089] other non-human animals which can be used as AD models.

[0090] In a particular embodiment, the genes related directly or indirectly to AD are selected from the group consisting of the PS1, PS2 genes, and the epsilon4 (ε4) allele of the APOE gene, or other genetic predisposition factors related to the disease, such as the α₂-macroglobulin gene, the very low density lipoprotein receptor gene, the gene of the lipoprotein receptor-related protein LRP, of the Tau protein, of butylcholinesterase K, of cathepsin D, of interleukin and of choline acetyltransferase.

[0091] In another particular embodiment, the transgenic non-human mouse of the invention can be crossed with a knock-out mouse for the murine APP (mAPP) gene, such that after several crossings, a mouse expressing only the hAPP transgene can be obtained.

[0092] Therefore, in another aspect, the invention relates to the use of a transgenic non-human animal according to the invention to obtain a transgenic non-human animal expressing only the hAPP transgene and not the mAPP gene.

[0093] In another aspect, the invention relates to a method for identifying a potentially useful compound for the treatment and/or prevention of AD, comprising:
[0094] a) administering a candidate compound to a transgenic non-human animal of the invention;
[0095] b) determining the expression pattern of the hAPP gene and/or the hAPP protein production and/or the β-amyloid (Aβ) peptide production in said transgenic non-human animal of step (a), and
[0096] c) selecting the candidate compound causing (i) a decrease in the hAPP gene expression levels in nervous tissue, (ii) a decrease of hAPP protein production and/or accumulation and/or (iii) a decrease in Aβ peptide production and/or accumulation in said transgenic non-human animal.

[0097] The hAPP gene expression levels, the hAPP protein production and/or accumulation levels as well as the Aβ peptide production and/or accumulation levels in nervous tissue can be measured by means of conventional techniques known by the person skilled in the art, such as quantitative RT-PCR, Northern blot, Western blot, etc. Preferred ranges of hAPP gene expression levels or of hAPP protein accumulation levels can be found in FIGS. 24 and 26 respectively.

[0098] In a particular embodiment, the candidate compound causing a decrease in the hAPP gene expression levels, or a decrease in the hAPP protein production and/or accumulation levels or a decrease in Aβ peptide production and/or accumulation compared to the control levels is selected. Said compound can be any of the compounds mentioned above.

[0099] The transgenic non-human animals of the invention can be obtained by any transgenesis method known by the person skilled in the art, such as microinjection, electroporation, particle bombardment, cell transformation followed by cloning (the nuclei of the successfully transformed cells are transferred to enucleated ova and are implanted in receptor females), gamete transformation (introducing genes in oocytes or spermatocytes and using the transformed gametes for fertilization, generating a complete animal) and/or intracytoplasmic sperm microinjection (ICSI).

[0100] In a particular embodiment, as described in the examples enclosed herein, the transgenesis method used is based on intracytoplasmic sperm microinjection. Said technique is extensively described in international patent application WO 2005/098010.

[0101] The animals obtained by the previously described transgenesis method have the characteristic genotype and phenotype of the transgenic non-human animal of the invention, they contain, inserted in their genome, the nucleotide sequence of the complete hAPP gene together with the regulatory sequences thereof and said hAPP gene has an endogenous expression pattern similar to the expression pattern that this same gene has in humans.

[0102] Like the transgenic non-human animal of the invention, the transgenic non-human animals obtained by the previously described transgenesis method can also be crossed with other non-human animals of the same species to obtain transgenic non-human animals having the genotype and phenotype characteristics of their progenitors, giving rise to different non-human animals which can used as a model for studying AD.

[0103] In addition, the descendants of the transgenic non-human animals obtained by the transgenesis method described in the present invention can have an endogenous expression pattern of the hAPP gene similar to the pattern of said protein in humans.

[0104] Another aspect of the present invention therefore relates to the offspring of a transgenic non-human animal, which can be obtained according to the transgenesis method described in the invention, endogenously expressing the human APP gene with an expression pattern similar or equivalent to the expression pattern of said gene in humans.

[0105] The following example illustrates the invention and must not be considered in a limiting sense thereof.

### EXAMPLE

### Obtaining a Transgenic Non-Human Animal Endogenously Expressing the Complete Human APP Gene with an Expression Pattern Equivalent to the Expression Pattern of Said Gene in Humans

### Material and Methods

### 1. Plasmid Generation

### 1.1 General Cloning

[0106] The usual molecular biology techniques (Sambroock, J., 1989, mentioned above; Ausubel F M, B. R., Kingston R E, Moore D D, Seidman J G, Smith J A and Struhl, K. (1999). Current Protocols in Molecular Biology, John Wiley and Sons.) and techniques refined in the laboratory of the inventors (Montoliu, 1997 Lab protocols. Generation of a transgenic mouse) were used to generate the necessary vectors for this work.

### 1.2 DNA Electrophoresis

[0107] The separation, identification and quantification of the different DNA fragments were carried out by means of electrophoresis in agarose gels. Ultra Pure Agarose (GIBCO-BRL) at concentrations comprised between 0.5 and 2% was used, a range of molecules from 100 bp to 12 kb being able to be separated. Horizontal Ecogen cells (6.5×8 cm and 11×15 cm) were used in which a current of 5 V/cm was applied with a Sogainvex electric source. The gels were made in TAE buffer (40 mM Tris-Acetate, 2 mM EDTA (ethylenediamine tetraacetic acid) pH 8 (Merck)) and with ethidium bromide (Roche) at 0.5 μg/ml.

### 1.3 DNA Quantification

[0108] DNA quantification was carried out by means of different methods, depending on the necessary precision and the expected concentration. The estimation of the DNA concentration in samples the expected concentration range of which ranged between 0.05 and 2 μg/μl was carried out in the SHIMADZU UV-1601 model spectrophotometer, based on the spectrophotometric measurement of the DNA absorbance at a wavelength of 260 nm. The measurements were carried out according to the instructions of the company and taking into account that one unit of optical density at a wavelength of 260 nm (OD₂₆₀) corresponds to 50 μg/ml of double-stranded DNA, the DNA concentration was calculated according to the following equivalence:

$$Double \text{-} stranded DNA concentration in µg \text{/} ml = {OD}_{260} \times \frac{\begin{matrix}50 µg \text{/} ml \times \\ Dilution Factor\end{matrix}}{1 {OD}_{260}}$$

[0109] The Hoefer DyNA Quant 200 Fluorometer (Amersham Pharmacia Biotech) was used to estimate samples the concentration of which was estimated between 0.01 and 0.05 μg/μl. This method measures the fluorescence of bisbenzamide (Hoeschst 33258), which molecule has the capacity to bind to the double-stranded DNA, emitting fluorescence which can be detected by the fluorometer when it is excited by means of UV light at 365 nm. This method is very useful to measure in small concentration ranges, because the background due to loose nucleotides or RNA is prevented. All these measurements were verified by means of nanodrop (Nanoprop, ND-1000 spectrophotometer).

### 1.4 Polymerase Chain Amplification Reaction (PCR)

[0110] DNA fragments for cloning and the amplifications of specific YAC regions, both for analyzing recombinations and for verifying the integration thereof in transgenic mice, were obtained by means of PCR.

[0111] PCR requires specific conditions for each amplified fragment. The mixture reaction concentrations, like the temperatures, amplification times and cycles, vary for the different reactions. The standard starting conditions for all the reactions are as follows: 1.5 mM MgCl₂ (Biotools), 200 μM deoxynucleotides [dATP, dCTP, dTTP and dGTP (Roche)], specific pair of oligonucleotides at 1 μM (Isogen), 1× reaction buffer (Biotools) and 1 unit of Taq polymerase (Biotools), all in a volume of 25 μl. The reaction was carried out in 0.2 ml tubes (MJ Research) in the MJ Research PCT-100 model thermal cycler. The programs used varied depending on the fragment to be amplified. They generally consisted of a first DNA denaturation at 95° C. for 5 minutes, then a cycle of 3 temperatures which was repeated 35 times, 30 seconds at 95° C., 30 seconds between 55-65° C. depending on the oligonucleotide hybridization temperature and 1 minute at 72° C. They were finally subjected to 10 minutes at 72° C. for the complete amplification of the fragments.

### 1.4.1 PCR of Yeast Colonies

[0112] The yeast colonies were analyzed to study the different homologous recombinations. In order to carry out a direct PCR of the colony, preventing growing them and extracting the DNA therefrom, the colony was transferred to a PCR tube (0.2 ml) in which it was resuspended in 50 μl of Zymolyase (20 U/ml), incubating for 10 minutes at room temperature. The tubes were centrifuged at 5,000 r.p.m. in an Eppendorf 5417c table top centrifuge, the supernatants were eliminated and the cells were heated for 5 minutes at 95° C. The precipitate was resuspended in 15 μl of water and 5 μl were used to carry out the PCR.

1.5 DNA Purification and Extraction from Agarose Gels

[0113] The DNA fragments of less than 10 kb were purified by means of agarose gels in TAE buffer. After separating the fragments in the gel, they were identified by means of a UV lamp (Upland). The bands were then cut with a sterile blade and were introduced in an Eppendorf tube. The DNA was extracted from the gel by means of the QIAaqen Qiaquick gel extraction kit according to the instructions described in the protocol thereof.

### 1.6 Prokaryotic Cells

### 1.6.1 Bacterial Strains and Culturing

[0114] The recombinant plasmids were amplified in commercial E. coli strains. The plasmids the size of which was about 5 kb were amplified and transformed into DH5α cells (Gibco), whereas the plasmids with a size close to 10 kb were amplified and transformed into TOP10F′ cells (Stratagen).

[0115] The bacterial growth for the amplification of the different plasmids was carried out in LB (Luria-Bertani) liquid medium at 37° C. for at least 8 hours with stirring (250 r.p.m.) and in the presence of ampicillin (Sigma), at a final concentration of 50 μg/ml. Colony screening was carried out after growing the transformations in Petri dishes with agar and LB medium in the presence of ampicillin and, in the cases in which color screening could be carried out, with X-gal and IPTG.

### 1.6.2 Preparation and Transformation of Competent Bacteria

[0116] Competent DH5α cells were prepared by means of the calcium chloride method and were transformed by means of the thermal shock method.

[0117] Large plasmids were transformed using commercial TOP10F′ strains (Stratagen). Electroporation was carried out in electroporation cells with a diameter of 2 mm (Bio Rad) previously cooled in ice, and giving a pulse in conditions of 25 μF, 2.5 KV and 200Ω using the Bio-Rad Gene Pulser according to the indications of the company.

### 1.6.3 Plasmid DNA Purification

[0118] Small-scale plasmid DNA purifications were carried out inoculating the colony in question in 2 ml of LB medium and antibiotics. These cultures were grown for at least 8 hours at 37° C. and with stirring (250 r.p.m.). The plasmid DNA was extracted using the alkaline lysis method. The preparation of plasmid DNA at a greater concentration and amount was carried out by means of culturing large amounts of bacteria (100-500 ml) using commercial Qiagen maxi kits (Qiagen) and Flexiprep Kits (Amersham Pharmacia) according to the specific protocols of each kit.

### 2. Oligonucleotides

[0119] The oligonucleotides used to delimit the flanking 5 and 3′ regions of the APP gene in the YAC, and their distance to the closest encoding gene region, are:

[SEQ ID NO: 1]

| | |
|---|---|
| APP3′-B-U | 5′-atcctaagaggaagggatcttaagg-3′ |

[SEQ ID NO: 2]

| | |
|---|---|
| APP3′-B-L | 5′-gggagaacaaacatacctcactagc-3′ |

[SEQ ID NO: 3]

| | |
|---|---|
| APP3′-A-U | 5′-ccagcatgttttccaaagtatgag-3′ |

[SEQ ID NO: 4]

| | |
|---|---|
| APP3′-A-L | 5′-tgaaatgtccccacactgatcactg-3′ |

[SEQ ID NO: 5]

| | |
|---|---|
| APP3′-1-U | 5′-gtatagtatggatggttcaaacagagccta-3′ |

[SEQ ID NO: 6]

| | |
|---|---|
| APP3′-1-L | 5′-aaggtaaagctctagaatctatcagtgcct-3′ |

[SEQ ID NO: 7]

| | |
|---|---|
| APP3′-2-U | 5′-tttagaagagctcagtaagaatccacattt-3′ |

[SEQ ID NO: 8]

| | |
|---|---|
| APP3′-2-L | 5′-cattttgtcgttactagtaccattggtttc-3′ |

[SEQ ID NO: 9]

| | |
|---|---|
| ABP5′-1-U | 5′-ctcaaaaacagcaacacagatgtgc-3′ |

[SEQ ID NO: 10]

| | |
|---|---|
| APP5′-1-L | 5′-gagcttaaacaccttcctctgc-3′ |

[SEQ ID NO: 11]

| | |
|---|---|
| APP5′-2-U | 5′-tggggagaggaatggaatttggagc-3′ |

[SEQ ID NO: 12]

| | |
|---|---|
| APP5′-2-L | 5′-gtcatttccagaaaaagcccactgc-3′ |

[SEQ ID NO: 13]

| | |
|---|---|
| APP5′-3-U | 5′-tcaaggacatggagattgggcaggc-3′ |

[SEQ ID NO: 14]

| | |
|---|---|
| ABP5′-3-L | 5′-ggggtaacaggttgccggtcatatg-3′ |

[SEQ ID NO: 15]

| | |
|---|---|
| APP5′-4-U | 5′-caccagaccatgatgtctcagtagc-3′ |

[SEQ ID NO: 16]

| | |
|---|---|
| APP5′-4-L | 5′-ctgcaaaacagccctcatattctgc-3′ |

[SEQ ID NO: 17]

| | |
|---|---|
| APP5′-5-U | 5′-tagcatcctttgctaagccagttgc-3′ |

[SEQ ID NO: 18]

| | |
|---|---|
| APP5′-5-L | 5′-gcttgttattggaggttccagcacg-3′ |

[SEQ ID NO: 19]

| | |
|---|---|
| ABB5′-6-U | 5′-tccaacgggggagtgagtgaaaggc-3′ |

[SEQ ID NO: 20]

| | |
|---|---|
| APP5′-6-L | 5′-gcctcactcctgcaaacgtgcccaa-3′ |

[SEQ ID NO: 21]

| | |
|---|---|
| APP5′-7-U | 5′-tctttcttccaccttggtatcctgc-3′ |

[SEQ ID NO: 22]

| | |
|---|---|
| APP5′-7-L | 5′-caggatgtctctggatttttactcg-3′ |

[0120] The oligonucleotides used to verify the exons of the APP gene, as well as the presence of the GABPA gene, are the following:

| | |
|---|---|
| APP Ex1-U | |
| 5′-agtttcctcggcagcggtagg-3′ | [SEQ ID NO: 23] |
| APP Ex1-L | |
| 5′-ccagcaggagcagtgccaaac-3′ | [SEQ ID NO: 24] |
| APP-EX2-U | |
| 5′-aagaccgggctgattcctaa-3′ | [SEQ ID NO: 25] |
| APP-EX2-L | |
| 5′-tccaacgtgaattgctagcc-3′ | [SEQ ID NO: 26] |
| APP-EX3-U | |
| 5′-cccaagcattttggataagg-3′ | [SEQ ID NO: 27] |
| APP-EX3-L | |
| 5′cctctttttcttccctcaag-3′ | [SEQ ID NO: 28] |
| APP-EX4-U | |
| 5′-ttgattgggttgcttaggca-3′ | [SEQ ID NO: 29] |
| APP-EX4-L | |
| 5′-tgttgcctcaaaatacccct-3′ | [SEQ ID NO: 30] |
| APP-EX5-U | |
| 5′-ctaccactcactgttttctc-3′ | [SEQ ID NO: 31] |
| APP-EX5-L | |
| 5′-gcagagaccttttcagtgat-3′ | [SEQ ID NO: 32] |
| APP-EX6-D | |
| 5′-tgccaaaattccatatggacg-3′ | [SEQ ID NO: 33] |
| APP-EX6-L | |
| 5′-gggatttgccaagcagcatat-3′ | [SEQ ID NO: 34] |
| APP-EX7-U | |
| 5′-ccactgggaggattaaaaga-3′ | [SEQ ID NO: 35] |
| APP-EX7-L | |
| 5′-gagaagtggacagaaatgtg-3′ | [SEQ ID NO: 36] |
| APP-EX8-U | |
| 5′-tgtcagtggactcgtgcatt-3′ | [SEQ ID NO: 37] |
| APP-EX8-L | |
| 5′-catctcaagctgtctggcaa-3′ | [SEQ ID NO: 38] |
| APP-EX9-U | |
| 5′-catgtcttcagcaccaactg-3′ | [SEQ ID NO: 39] |
| APP-EX9-L | |
| 5′-caaactgtgcccacacagta-3′ | [SEQ ID NO: 40] |
| APP-Ex10-U | |
| 5′-cagataggaaggggtatgta-3′ | [SEQ ID NO: 41] |
| APP-Ex10-L | |
| 5′-ggagcaaatataaggcagga-3′ | [SEQ ID NO: 42] |
| APP-EX11-U | |
| 5′-tgatgagggttggagagtgca-3′ | [SEQ ID NO: 43] |
| APP-EX11-L | |
| 5′-caagatggaatggacaggggt-3′ | [SEQ ID NO: 44] |
| APPEx12-13-U | |
| 5′-cctcgtcacgtgttcaatat-3′ | [SEQ ID NO: 45] |
| APPEx12-13-L | |
| 5′-caacttcatcctgaatctcc-3′ | [SEQ ID NO: 46] |
| APPEx14-U | |
| 5′-cacgtgaaagcagttgaagt-3′ | [SEQ ID NO: 47] |
| APPEx14-L | |
| 5′-ttgccacctatacaatggag-3′ | [SEQ ID NO: 48] |
| APPEx15-U | |
| 5′-ctggcacatcaatagcgata-3′ | [SEQ ID NO: 49] |
| APPEx15-L | |
| 5′-actcggaacttgggaaatga-3′ | [SEQ ID NO: 50] |
| APPEx16-U | |
| 5′-taaaggcagcagaagcctta-3′ | [SEQ ID NO: 51] |
| APPEx16-L | |
| 5′-gctcagcctagcctatttat-3′ | [SEQ ID NO: 52] |
| APPEx17-U | |
| 5′-accagttgggcagagaatat-3′ | [SEQ ID NO: 53] |
| APPEx17-L | |
| 5′-cttgagcagaatattcacgg-3′ | [SEQ ID NO: 54] |
| APPEx18-U | |
| 5′-cttggtaattgaagaccagc-3′ | [SEQ ID NO: 55] |
| APPEx18-L | |
| 5′-cttttgacagctgtgctgta-3′ | [SEQ ID NO: 56] |
| GABPA-EX-U | |
| 5′-tattattacgatggggacat-3′ | [SEQ ID NO: 57] |
| GABPA-EX-L | |
| 5′-gtaaagcaacatctaaagca-3′ | [SEQ ID NO: 58] |

[0121] The oligonucleotides used for the sequencing of the different cloning vectors used for the recombination are:

| | |
|---|---|
| SV40A-2 | |
| 5′-gtgaaggaaccttacttctgtggtg-3′ | [SEQ ID NO: 59] |
| Sp6 Promoter | |
| 5′-atttaggtgacactata-3′ | [SEQ ID NO: 60] |
| T7 Promoter | |
| 5′-taatacgactcactctcggg-3′ | [SEQ ID NO: 61] |

[0122] The oligonucleotides used to clone the yeast URA gene are:

| | |
|---|---|
| URA3-U | |
| 5′-gcccagtattcttaacccaaactgca-3′ | [SEQ ID NO: 62] |
| URA3-L | |
| 5′-cttccacccatgtctctttgagcaa-3′ | [SEQ ID NO: 63] |

[0123] The oligonucleotides used to detect auxotrophic YAC sequences are:

| | |
|---|---|
| TRP1 | |
| 5′-gcccaatagaaagagaacaattgacc-3′ | [SEQ ID NO: 64] |
| TRP2 | |
| 5′-acacctccgcttacatcaacacc-3′ | [SEQ ID NO: 65] |
| LYS1 | |
| 5′-accaagccagcatctgtatcacc-3′ | [SEQ ID NO: 66] |
| LYS2 | |
| 5′-gccaaatccatccacttctcatc-3′ | [SEQ ID NO: 67] |

[0124] The oligonucleotides used to generate probes for the Southern blot analysis are:

| | |
|---|---|
| ProbeAPP-seq2-U | |
| 5′-tgaatcttggcatttgggcc-3′ | [SEQ ID NO: 68] |
| ProbeAPP-seq2-L | |
| 5′-cctgtaacttgccctcatag-3′ | [SEQ ID NO: 69] |
| ProbeAPP-seqA-U | |
| 5′-gaaacgagttgaaaggcacag-3′ | [SEQ ID NO: 70] |
| ProbeAPP-seqA-L | |
| 5′-tttacccttccatgaagtccc-3′ | [SEQ ID NO: 71] |
| ProbeAPP-seqB-U | |
| 5′-ggcttgtaaattaaactctgaagc-3′ | [SEQ ID NO: 72] |
| ProbeAPP-seqB-L | |
| 5′-cctcagtggctgttttgagagcat-3′ | [SEQ ID NO: 73] |

### 3. Yeast Artificial Chromosome Modifications

### 3.1 Eukaryotic Cells

[0125] All the experiments carried out in yeasts were carried out in the S. cerevisiae AB1380 strain the metabolic characteristics of which are: Mata, ura3-52, trp1, ade2-1, lys2-1, his5 and can1-100. The original clone used was purchased in Washington University, Human Yeast Artificial Chromosome Clone, which contained the YAC B142F9 (650 Kb YAC containing the complete human APP gene).

[0126] The YAC carrier yeasts were grown in liquid and solid medium with autotrophic selectors to prevent the sporadic YAC elimination. The liquid cultures were grown for 2-3 days at 30° C. and with stirring (200 r.p.m.), whereas the yeasts were grown for 4-5 days at 30° C. to obtain colonies in plates.

[0127] The selective media were prepared with D+Glucose (Merck), YNB (Yeast Nitrogen Base w/o Amino Acids) (Difco) and the corresponding amino acids (Serva).

### 3.2 Homologous Recombination in Yeasts

[0128] The transformation of yeast cells was carried out by two methods, each of them with very different results: the Lithium Acetate (LiAc) method (Markie, D. (1995). YAC Protocols [Please complete the reference]; Alison, A. G., D; Kaiser, C; Stearns, T (1997). Methods in Yeast Genetics, Cold Spring Harbor Laboratory Press.) and yeast cell electroporation (Becker, D. M. and L. Guarente (1991). “High-efficiency transformation of yeast by electroporation.” Methods Enzymol 194: 182-7)

### 3.3 Analysis by Means of DNA-DNA Hybridization (Southern Blot)

[0129] The analysis of positive clones was carried out by means of the Southern blot technique. Between 2-4 μg of genomic DNA were digested with 40-60 U of the corresponding enzyme [Eco RV, Sea I, Bgl II, Bam HI, Hind III, Sal I and Eco RI] in 1× digestion buffer with 4 mM spermidine. The digestion was incubated at the enzyme cutting temperature for 12-14 hours. The digestion products were electrophoretically separated in a 0.8% agarose gel in horizontal Horizon cells (20×25 cm) (Life Technologies).

[0130] The DNA was transferred to a Hybond™-N nylon membrane (Amersham) by means of capillarity. To that end, 14-16 hours in SSC 20× transfer buffer [3 M NaCl, 0.3 M sodium citrate] were needed. The gel was previously treated with a washing in 0.25 N HCl for the depurination of the DNA and two 15-minute washings in 0.4 M for the neutralization and denaturation of the DNA.

[0131] Once the DNA was transferred to the membrane, it was fixed by UV irradiation with the CL-1000 Ultraviolet Crosslinker (UVP-Stratagen), giving two pulses of 70,000 mJ/cm2.

[0132] The single-copy probe was obtained by enzymatic restriction or by means of PCR, and was labeled with radioactivity using 50 ng of DNA, 25 μCi of α-³²P-dCTP (Amersham) and the High Prime kit (Roche) according to the instructions of the company. To eliminate free nucleotides from the labeled probes, such probes were purified through Probe Quant G50 columns (Amersham). The activity of the probes was quantified in the W 1414 scintillation counter (Beckmann), an activity of approximately 1×10⁶ cpm/μl being obtained.

[0133] The hybridization was carried out incubating the membrane with the corresponding probe (SEQ ID NO: 68, SEQ ID NO: 69, SEQ ID NO: 72 and SEQ ID NO: 73) for 14-16 hours at 65° C.

[0134] The hybridized filters were exposed in exposure cassettes with intensifying screens (Amersham) and photographic films (X-Omat, Kodak) for several days at −80° C. The filters were alternatively exposed in PhosphorImager cassettes (Molecular Dynamics) for 1-2 days at room temperature and the signal was analyzed by means of the IQMac v 1.2 program (Molecular Dynamics).

3.4 Small-Scale Preparation of Agarose Blocks with Yeast Cells

[0135] To analyze the YAC modification, agarose blocks containing whole cells were prepared, thus achieving that the chromosomes remained intact, and that the size variations experienced by a chromosome can be verified by means of pulsed field electrophoresis. The following protocol was followed:

[0136] 10 ml of selective medium were inoculated with the yeast clone to be analyzed, allowing it to grow to saturation at 30° C. and with stirring (200 r.p.m.). The culture was centrifuged at 3,000 r.p.m. for 5 minutes at room temperature, the supernatant being discarded, and the precipitate was resuspended in 10 ml of 50 mM EDTA pH 8 and centrifuged again at 3,000 r.p.m. for 5 minutes at room temperature. This time, the precipitate was resuspended in 300 μl of Solution I (1M sorbitol, 20 mM EDTA pH 8, 14 mM β-mercaptoethanol and 2 mg/ml of zymolyase 20T), attemperated at 40° C. Once attemperated, 50 μl of a solution of zymolyase 20T at 10 mg/ml were added, then adding 500 μl of Solution II (Solution I with 2% of agarose, Sea Plaque) also attemperated at 40° C. It was mixed using a pipette with a blue tip cut at the end and it was distributed in the molds using a 200 μl pipette with a yellow Lip which is also cut at the end. 80 μl per mold were added. They were incubated in ice for 10 minutes so that the agarose solidified and once solidified, the cubes were again transferred to a 10 ml tube with 4 ml of Solution III (1M sorbitol, 20 mM EDTA pH 8, 10 mM Tris pH 7.5, 14 mM β-mercaptoethanol and 2 mg/ml of zymolyase 20T), incubating at 37° C. from 1 to 3 hours, with gentle stirring. Solution III is then changed for 5 ml of Solution IV (1% lauryl sulfate, 100 mM EDTA pH 8, 10 mM Tris pH 8) and it was incubated again for 1 hour at 37° C. Solution IV was subsequently substituted with new solution and incubated at 37° C. overnight. The next day the cubes were washed with 5 ml of 20% NDS (0.5 M EDTA, 1 mM Trizma base, 34 mM N-lauryl sarcosine, pH 9) for 2 hours at room temperature, they were changed for new solution and could be stored at 4° C.

### 3.5 Pulsed Field Gel Electrophoresis (PFGE)

[0137] All the gels were prepared at 1% of agarose LMP Sea Plaque in 0.5×TBE buffer (100 mM Tris-Borate, 1 mM EDTA pH 8.3). The pulsed field electrophoresis system was of Gene Navigator System (Amersham). The yeast markers PFGE marker II (Roche) were used as molecular weight markers, which markers correspond to agarose cubes of S. cerevisiae YPH 755 (chromosomes 90, 220, 280, 360, 450, 560, 610, 700, 770, 810, 850, 920, 960, 1,010, 1,100, 1,600 and 2,200 kb).

[0138] The initial YAC originally had a size of approximately 650 kb, and the final size after the modifications was 520 kb, therefore a program which optimally separated the chromosomes of this size was used for all the pulsed field electrophoreses which were carried out. The program lasted 26 hours, at 200 V: the first 12 hours with pulses of 50 seconds and the 14 remaining hours with pulses of 100 seconds. Once the gel had finished running, it was stained for 30 minutes in 1-2 liters of electrophoresis buffer with ethidium bromide (EtBr) (0.5 μg/ml).

[0139] For the purpose of analyzing the YAC obtained, the chromosomes were transferred to a Hybond™-N nylon membrane (Amersham) to be analyzed. The transfer was carried out in a manner similar to the transfer already described for Southern blot, except for a few small differences: Prior to the transfer, the gel was subjected to a treatment of 5 minutes to UV light (254 nm) to break the large DNA molecules. Each of them was subsequently incubated twice for 20 minutes with 0.25 N HCL, and then once for 30 minutes with 0.4 M NaOH. The transfer by capillarity was left for at least 48 hours. Both the fixing and the hybridization were carried out as already described in section (3.3).

### 4. Preparation of the YAC for Microinjection

[0140] 4.1 Large-Scale Preparation of Agarose Blocks with Yeast Cells

[0141] Agarose cubes with a high cell density were prepared in order to isolate a sufficient amount of DNA and generate the transgenic mouse of the invention. To that end, the following process was followed:

[0142] 200 ml of selective medium were grown with the yeast containing the YAC until saturation. It was centrifuged for 5 minutes at 600 g, eliminating the remaining medium. It was resuspended in 40 ml of 50 mM EDTA (pH 8) per 100 ml of original culture and it was centrifuged again, discarding the supernatant. The yeast precipitate was weighed, assuming a density of 1, the yeasts were taken to a volume of 50% with Solution I and the mixture was attemperated at 37° C. Once attemperated (about 30 seconds), the same volume of Solution II was added, it was stirred gently and 80 μl were distributed in the molds, which were being cooled at 4° C. It was allowed to gel for 10 minutes. The cubes were changed to a tube with 8 ml of Solution III per milliliter of cubes and it was incubated for 2 hours at 37° C., with stirring. Solution III was substituted with the same amount of Solution IV and it was incubated for 1 hour at 37° C. It then had to be substituted with new solution and it was left at 37° C. overnight. The next day, the cubes were washed at room temperature for 2 hours with 8 ml of 20% NDS per milliliter of cubes. The washing was repeated and they were ready to be loaded.

### 4.2 YAC Purification by Means of Pulsed Field

[0143] The preparation of the pulsed field for YAC purification required a series of considerations, because the product of this purification was going to be directly used to generate transgenic mice. High sterility working conditions were used, using sterile and disposable material at all times; the region of the gel from which DNA was to be extracted was prevented from coming into contact with EtBr because it has a high mutagenic power, and any solution containing the YAC was pipetted with sterile tips which were cut at the tip to prevent breakages in the DNA molecules.

[0144] A large well was prepared by joining seven normal wells of the pulsed field such that 9 cubes can enter. Marker II and ½, ¼, ⅛ and 1/16 cube fractions were loaded into contiguous wells. The gel was run using the program chosen for the separation in this size range (26 hours, at 200 volts; first 12 hours with pulses of 50 s and the remaining hours with pulses of 100 s). Once it was run, the gel was cut into three pieces with a sterile scalpel in the running direction of the gel, thus generating a central piece containing the entire large well, and two side pieces containing the fractions and the markers. These two pieces were stained with EtBr (0.5 μg/ml), whereas the central piece was kept in running buffer. The stained pieces were used to locate the modified YAC in the fragment which had not been stained. Once the YAC was located, the agarose block containing it was cut and equilibrated in 50 ml of the equilibrium buffer (10 nM Bis-Tris-HCl pH 7.5, 0.1 mM EDTA, 100 mM NaCl, 0.03 mM Spermine and 0.07 mM Spermidine) at 4° C. for at least 16 hours. The agarose block containing the modified YAC was then divided into four pieces, which were transferred to 1.5 ml tubes and liquefied by heating for 10 minutes at 70° C., subsequently being attemperated at 45° C. to add the agarase (GELase™ Epicentre), 5 units per 100 mg of agarose, and it was incubated at 45° C. for three hours. The dissolved agarose was then transferred to a Millipore ultracentrifugation column (Ultrafree-®MC Millipore), in which all DNA was concentrated in the column by means of serialized 2-minute centrifugations at 6,000 r.p.m. This operation was repeated until obtaining a final volume of 100 μl and the column was left overnight at 4° C. so that the DNA resuspended. A dialysis filter (Millipore) was subsequently placed in a Petri dish with 40 ml of microinjection buffer (10 mM Tris-HCl pH 7.5, 0.1 mM EDTA pH 8, 100 mM NaCl, 0.03 mM Spermine, 0.07 mM Spermidine and sterile water) and it was allowed to dialyze for 2 or 3 hours. After this time, the drop containing the modified YAC was collected.

5. Generation of a Transgenic Mouse by Means of Intracytoplasmic Sperm Injection (ICSI), which Sperm is Incubated with YAC DNA

[0145] The generation of a transgenic mouse comprising the modified YAC was carried out according to the protocols that are extensively described in patent application WO2005/098010 and in Moreira, 2003 (Moreira, P. N., et al., 2003, “Mouse ICSI with frozen-thawed sperm: the impact of sperm freezing procedure and sperm donor strain”, Mol Reprod Dev. 66(1): 98-103) and Moreira, 2004 (Moreira, P. N., et al., 2004, “Efficient generation of transgenic mice with yeast artificial chromosomes by intracytoplasmic sperm injection”, Biol Reprod. 71(6): 1943-7).

6. Analysis of Founder Mice and their Descendants

### 6.1 Analysis of Founder Mice by Means of PCR

[0146] The PCR technique was chosen for carrying out the analysis of the transgene due to the fact that this technique is highly specific and is the quickest for identifying the transgene. Seventeen PCRs of the different exons of the APP gene, two PCRs of the YAC arms and another four PCRs of non-gene encoding regions, were designed for studying the mice. Twenty-three PCRs of all the mice born were carried out according to the protocol described above (1.3) and only those positive for all the PCRs were considered as carrier mice of the entire transgene.

### 6.2 Transmission to the Germ Line

[0147] The mice considered to be carriers of the transgene were crossed with C57BL/6J mice and their offspring were analyzed. The analysis of the transmission was carried out by means of the PCR of the two YAC arms (LYS2 and TRP1) and of two exons of the APP gene (Exons 6 and 11).

### 7. Protein Characterization

### 7.1 Measurement of the Protein Concentration

[0148] The protein concentration was quantified by the Bradford method using bovine serum albumin (BSA) as a standard.

### 7.2 Electrophoresis of Proteins in Polyacrylamide Gels in the Presence of SDS (SDS-PAGE)

[0149] 3% concentrating gels and separating polyacrylamide gels with a variable percentage (7.5, 8, 10 or 15%) according to the molecular weight of the proteins to be analyzed were used. 25 mM Tris-HCl pH 6.3, 10% glycerol, 2% SDS, 5% β-mercaptoethanol and 0.01% bromophenol blue was used as sample buffer.

[0150] The high molecular weight Rainbow™ colored molecular weight standards from Amershamm Pharmacia (220, 97.4, 66, 46, 30, 21.5 and 14.3 kDa) were used as molecular weight standards.

### 7.3 Western Blot

[0151] Briefly, the proteins resolved in polyacrylamide-SDS gels as described in the previous section were transferred to a nitrocellulose filter (Bio-Rad) with a pore size of 0.45 μm for 90 minutes with a current of 1.3 mA/cm² by means of the semi-dry electrophoretic transfer method.

[0152] After viewing the transferred proteins by means of staining with Ponceau S red, the membrane was saturated overnight at 4° C. in PBS with 3% BSA and 0.2% Tween-20 for the purpose of blocking unspecific bindings.

[0153] The membranes were then incubated for 2 hours at room temperature with the different specific antibodies diluted in PBS with 0.05% Tween-20 (PBST) and 1% BSA. The membranes were washed three times in PBST and incubated for 2 hours at room temperature with secondary antibodies bound to peroxidase diluted 1:50,000 in PBST with 1% BSA. A chemiluminescent method was finally used for the developing, in which peroxidase catalyzes the oxidation of the luminal reagent in the presence of H₂O₂ (“ECL” of Amersham).

[0154] The bands were quantified by means of densitometry (GS-710 Calibrated Imaging Densitometer, Bio-Rad).

### 7.4 Antibodies

[0155] 6E10. 6E10 is a purified mouse monoclonal antibody (Signet) recognizing residues 1-17 of the human Aβ sequence. It has been used for immunolabeling after electrophoresis at a final concentration of 5 μg/ml.

[0156] Anti-α-tubulin: Anti-α-tubulin (clone B-5-1-2) is a mouse monoclonal antibody (Sigma) recognizing a C-terminal epitope of isoform α of tubulin. It was used for immunolabeling after electrophoresis at a final concentration of 1:10,000.

[0157] Biotin-coupled anti-mouse. Purified antibody, generated in horses; it was obtained from Vector Laboratories.

### 8. Analysis of the Transgene Expression in the Different Tissues

### 8.1 Total RNA Isolation

[0158] The different mice tissue samples were homogenized by means of mechanical rupture and the total RNA was extracted with the commercial “High Pure RNA isolation” kit (Roche diagnostic 1 828 665) according to the protocol indicated by the manufacturer. The assessment of the amount of RNA obtained was carried out in the Nanodrop apparatus (NanoDrop. ND-1000 Spectrophotometer).

8.2 Passing from RNA to DNA by Retrotranscription

[0159] The retrotranscription was carried out with the “High Capacity cDNA Archive Kit” (Applied Biosystem), for each 1 μg sample of RNA, 4 units of reverse transcriptase “MultiScribe Reverse Transcriptase”, deoxynucleotides (dNTP), a specific buffer were used and random hexamers were used as indicators in the conditions indicated by the manufacturer, in a final volume of 100 μl. The tubes with the reaction mixture were subjected to the following temperature cycles in the GeneAmp PCR system 2400 or 9600 thermal cycler (Perkin-Elmer):

[0160] Preincubation at 25° C. for 10 minutes

[0161] Incubation at 37° C. for 120 minutes.

### 8.3 Quantitative PCR in 384-Well Plates

[0162] Quantitative PCR was carried out for all the prepared tissue samples, which were assayed in triplicate, for which 5 μl of cDNA, equivalent to 50 ng of original RNA, were used, using the universal conditions described by Taqman Universal PCR Master Mix, no. AmpErase Ung (Applied Biosystem). The probes used were: human APP gene, on Demand hAPP Hs00169098_m1 assay; murine APP gene, on Demand mAPP Mn00431827_m1 assay; and the internal control gene (houseKeeping) gapdh, onDemand Mn99999915_g1 assay.

[0163] The plates with the sample and the reaction mixture were subjected to the temperature cycles specified by the manufacturer, with the ABI PRISM 7900HT Sequence Detection System (Applied Biosystem), which allowed analyzing the samples in real time. The data obtained were analyzed with the SDS 2.1 ABI PRISM program (Applied Biosystem).

### 9. Observation Under Optical Microscope: Amyloid Plaque Detection

[0164] Before obtaining samples for histological studies, the mice were subjected to a perfusion and subsequently, the animal was dissected and the brain was extracted.

[0165] Condo red staining was carried out with the Accustain amyloid stain kit (Congo Red. Sigma diagnostic), using the protocol recommended by the manufacturer. The amyloid staining can be observed in red or pinkish red, the nuclei in blue and the elastic fibers in lighter red. When the samples were examined with birefringence, they can be observed in green-yellow.

### Results

[0166] The generation of a transgenic mouse endogenously expressing the human APP gene has been developed through the following steps: firstly, carrying out a computer study of YAC b142f9 and its adjacent regions, then eliminating the unknown sequences or the sequences corresponding to other genes present in the YAC, obtaining a modified YAC and subsequently, carrying out a transgenesis to achieve the integration of the entire modified YAC construct, ensuring that it is transmitted to the following generations and finally, verifying the transgene expression in the mice tissues and its levels.

### 1. Computer Analysis of the APP Gene and its Environment

[0167] The human APP gene is located in chromosome 21, in the 21q21.3 region, flanked by the CYYR1 gene in 5′ and the GABPA and ATP5J genes in 3′ (FIG. 2). The sequence of this entire region was obtained from the ENSEMBL database (http://www.ensembl.org/), where, in addition to human sequences, the sequences of different organisms, including the mus musculus sequence, area available. The hortologous region in mus musculus of the APP gene is located in chromosome 16c3.3, flanked by the same genes as in humans (FIG. 2), which leads to the supposition that the sequences are quite conserved.

[0168] The human APP gene sequence and its environment have been compared with that of the murine gene by means of a homology matrix (FIG. 3). Upon comparing 1 Mb of DNA sequence between both species, using the MacVector 7.1 program (Acceirys, Burlington, Mass., USA), it is observed that the region encoding the encoding region, like the promoter area of the APP gene, has a high degree of homology, As regards the adjacent regions, in the 5′ area of the APP gene less conservation is observed than in the encoding region, but the genome structure is maintained, whereas in the 3′ region of the gene, at about 60 kb thereof, there is a series of rearrangements in the murine region in relation to the human region. This particular genome structure is ideal for defining regions which are to be used to modify the YAC, demarcating it in 5′ up to a region corresponding to the Seq2 sequence, and in 3′ up to the start of the encoding regions of the GABPA gene [FIG. 1].

### 2. Choice of the Homology Sequences for the Recombination and Cloning in the Different Vectors

### 2.1 Study of the Repeated Regions

[0169] Two conditions are considered to be important when choosing sequences used in the homologous recombination of yeasts: on one hand, the size and on the other hand, its unique condition. As regards the size of the sequence to be chosen, it is normally considered to be suitable to be between 1 and 2 kb. As regards its unique condition, its suitability derives from the fact that the recombination occurs in the desired place. To locate the repetitive sequences and avoid them, the RepeatMasker program (A.F.A. Smith & P. Green, unpublished: http://ftp.genome.washington.edu/cgi-bin/repeatmasker/) was used, analyzing a mega base of the APP gene environment. Regions of 1 to 2 kb, both at 3′ and at 5′ of the gene were chosen on this sequence, from which repetitive sequences had been eliminated, to be cloned by means of PCR and be used for the homologous recombination in yeasts (FIG. 4).

### 2.2 Recombination Sequence Cloning

[0170] The different PCRs of the YAC containing the APP gene (b142f9) were carried out using the oligonucleotides described in section 2 (FIG. 4). The YAC extension was verified by means of these PCRs, and was located between sequences 2 and 3, in the 5′ region of the APP gene, and sequences A and B located before the GABPA gene in the 3′ region of the gene. Sequence 2 was used for the homologous recombination in 5′, since this is the sequence in 5′ farthest from the APP gene, located in the YAC, which is located at 128,354 kb from the gene transcription initiation site. In the region in 3′, both sequence A and B were cloned, since they were located at a distance of 100 and 80 kb, respectively, from the end of the APP gene and were located before the start of the GABPA gene. For the cloning, the PCR of sequences 2, A and B was carried out (FIG. 5), the bands corresponding to the selected sequences were purified and were cloned into the PCRII cloning vector (Invitrogen) to obtain pCRII-Seq2, pCRII-SeqA and pCRII-SeqB.

2.3 Generation of the Recombination Vector pB1R-Seq2

[0171] As schematically shown in FIG. 6, the plasmid PCRII-Seq2 and a variant of plasmid pB1R were used to generate plasmid pB1R-Seq2 (Lewis, B. C., N. P. Shah, B. S. Braun and C. T. Denny (1992). “Creation of a yeast artificial chromosome fragmentation vector based on lysine-2.” Genet Anal Tech Appl 9(3): 86-90). A neomycin selection gene was added to the original plasmid pB1R, such that this YAC, once modified can be used in other types of cultures if necessary. Sequence 2 of the cloning vector, PCRII-Seq2, was extracted by means of digestion with the EcoRI enzyme. The ends of this fragment were blunted for their subsequent cloning using the Klenow enzyme. The vector pB1R-Neo was linearized by means of digestion with the SacI enzyme. Using the T4 Ligase, the Seq2 fragment was bound to the vector pB1R-Neo, later verifying the correct orientation of the sequence in the vector by means of enzymatic digestion. Said vector was linearized by means of digestion with the SalI and SacI enzymes, such that it can be used for the 1^{st} homologous recombination in yeasts (FIG. 6).

2.4. Generation of the Recombination Vectors pYAC4 3′-SeqA and pYAC4 3′-seqB

[0172] The generation of these two recombination vectors is summarized in FIG. 7 (the cloning was carried out in parallel for the two sequences). The recombination sequences were obtained from the plasmids pCRII-SeqA and pCRII-seqB. For the extraction, they were first digested with the XhoI enzyme, blunting the end with the Klenow enzyme and subsequently, they were digested with BamHI, such that the sequences had a blunt end and another sticky end. Plasmid pYAC4 3′ is a derivative of pYAC4 (Burke, D. T., G. F. Carle and M. V. Olson (1992). “Cloning of large segments of exogenous DNA into yeast by means of artificial chromosome vectors. 1987.” Biotechnology 24: 172-8, and Burke, D. T. and M. V. Olson (1991). “Preparation of clone libraries in yeast artificial-chromosome vectors.” Methods Enzymol 194: 251-70), generated in the laboratory for studying regulatory sequences of the Tyrosinase gene. By means of digestion, first with EcoRI, blunting the ends again and later digesting with BamHI, a region which was not of interest was eliminated and the vector was linearized, such that the sequences A and B could be bound in an oriented manner to generate the vectors pYAC4 3′-SeqA and pYAC4 3′-SeqB.

[0173] However, the presence of a new auxotrophic marker was necessary so that these vectors could be used in the second homologous recombination. To that end, the URA3 marker of plasmid YDp-U was cloned (Alani, E., L. Cao and N. Kleckner (1987). “A method for gene disruption that allows repeated use of URA3 selection in the construction of multiply disrupted yeast strains.” Genetics 116(4): 541-5), first linearizing the vectors pYAC4 3′-SeqA and pYAC4 3′ SeqB by means of digesting with NotI (again using the Klenow enzyme to blunt the ends) and subsequently, the URA3 gene of plasmid YDp-U was obtained by means digesting with BamHI, its ends also being blunted for correct cloning. Using the T4 Ligase, the fragment was cloned into the vector. The linearization of the vectors pYAC4 3′-SeqA URA3 and pYAC4 3′-SeqB URA3 for their correct use in the 2nd recombination of the YAC was carried out by means of enzymatic digestion with BamHI and SpeI (FIG. 7).

### 3. Homologous Recombination in the 5′ Region of the YAC

[0174] The chromosomal fragmentation process has been used in this invention to modify the 5′ and 3′ regions, which consists of eliminating two regions at the ends of the original YAC, one of them being the region containing the GABPA gene in 3′.

3.1 Homologous Recombination in YAC b142f9 in the 5′ Region of the APP Gene

[0175] A total of 40 colonies was obtained by means of the transformation of the yeasts with LiAc method, using amounts of DNA varying between 100 and 1,000 ng. These 40 colonies were analyzed by means of PCR, obtaining three clones as possible positive clones.

[0176] In turn, yeast electroporation resulted in a total of 96 colonies, which were analyzed by means of the PCR technique. None of these showed a correct pattern as a possible positive clone.

3.2 Analysis of the Clones Resulting from the Homologous Recombination by Means of PCR

[0177] The analysis of the clones obtained by means of homologous recombination was carried out by means of designing a hybrid PCR characterized in that one of the two oligonucleotides used is located in the recombination plasmid (in a region which is not located in the YAC) while the other oligonucleotide is located in a region adjacent to the YAC recombination region. The PCR could thus only amplify the fragment when the recombination took place in the expected site. Another vector containing both regions was generated as a positive control. Only three of the 136 analyzed colonies, the colonies numbered 13, 14 aid b7, were positive for this PCR.

[0178] The analysis by means of these clones was completed by means of using another three PCRs, which could provide more information about them. The first two PCRs were carried out to verify if the clones which maintained part of the APP gene were those of the exons 6 and 11 thereof (FIG. 8). The third PCR used was that of a sequence located at 5 of the recombination region, which should be negative if the homologous recombination has been correct (FIG. 8). The three clones analyzed were positive for the PCRs of exons 6 and 11 and negative for the 5′ region, as shown in FIG. 8.

### 3.3 Determination of YAC Fragmentation by Means of Using Pulsed Field Electrophoresis

[0179] The correct homologous recombination in the YAC must involve a decrease in its size, which can be viewed by checking its electrophoretic mobility. The yeast genome can be separated in a gel, using the pulsed field electrophoresis technique (PFGE). According to this technique, the three analyzed clones were run together with the original clone, a clone of the same yeast strain (which does not contain any YAC) and a molecular weight marker. FIG. 9 shows the gel after the run, stained with EtBr. It can be observed between the 680 and 580 kb markers that there is a band in the original YAC clone which is not in the YAC-free yeast clone. This band seems to be maintained in clones 13 and B7, whereas it seems to disappear in clone 14.

[0180] The gel was subsequently transferred to a nitrocellulose membrane to carry out a DNA-DNA hybridization with an APP gene cDNA probe, and this verifies the change in electrophoretic mobility with greater certainty. FIG. 9 shows how clone 14 has experienced a variation of about 50 kb in the size of the YAC, which variation is the expected one after a correct recombination.

### 3.4 Analysis of the Recombination Region by Means of the Southern Blot Technique

[0181] YAC fragmentation by means of homologous recombination causes a series of modification in the DNA sequence in the recombination region. The variations between the recombinant clone sequence and the original clone sequence can be analyzed by means of the Southern blot technique. The digestion pattern for BamHI, ScaI, EcoRV, BglII and HindIII was different in the two clones.

[0182] In addition, a variation in the sizes of the bands is obtained in the Southern Blot carried out for the original clone of the APP gene and for clone 14 (FIG. 10), which shows that the recombination has occurred in the exact homology site, and together with the results obtained both in the PCR analysis and in the pulsed field electrophoresis, demonstrate a successful recombination in the 5′ region of the APP gene and enable using clone 14 as a basis for the next recombination.

### 3.5 Analysis of the Encoding Region of Clone 14

[0183] A comparative Southern blot was carried out to ensure that clone 14 had not experienced deletions in the encoding region of the APP gene. For this purpose, the original YAC and the modified YAC were digested with the BamHI restriction enzyme, subsequently hybridizing against APP gene cDNA. This hybridization causes a ladder of bands corresponding to the different gene encoding regions and which must be the same for both the original clone and for clone 14. The MacVector program was used to obtain the digestion pattern for the BamHI enzyme of the 300 kb of the APP gene. The fragments containing any of the gene encoding regions were then identified. FIG. 11 shows the theoretical pattern of this Southern blot and its coincidence with the ladder of bands obtained for the original clone b142f9 and the recombinant clone 14. The conservation of the band pattern obtained for the original clone b142f9 and the recombinant clone 14 indicates that encoding region has not experienced large modification or rearrangements after the recombination.

### 4. Homologous Recombination in the 3′ Region of the YAC

### 4.1 Homologous Recombination in YAC of Clone 14. GABPA Gene Elimination

[0184] The homologous recombination in the 3′ region of the APP gene was carried out on the modified YAC after the first recombination, which required using clone 14 to prepare competent yeasts to be used in the transformation. Two different vectors, pYAC4 3′-SeqA URA3 and pYAC4 3′-SeqB URA3 (FIG. 7) were used for this recombination, which vectors only differ in the recombination sequences. Said sequences are separated from one another by 20 kb and are more than 80 kb away from the end of the gene (FIG. 4). 40 to 60 kb of the YAC, including the GABPA gene, were eliminated by means of using these recombination sequences (FIG. 12).

[0185] Given the different efficiency in the transformation of the LiAc and electroporation methods, clearly in favor of the former (see section 3.1 of the previous section), it was decided to be used to carry out the second transformation. Unlike the first recombination, it was necessary to analyze 2,317 colonies for this recombination by means of a dual PCR, a first PCR carried out on exon 6 of the APP gene which should give a positive result, and a second PCR carried out on the GABPA gene which should give a negative result, which would indicate that the sequence corresponding to said gene had been eliminated.

[0186] 1,720 of the 2,317 colonies analyzed corresponded to sequence A and 597 corresponded to sequence B. After the PCR analysis of the different colonies, 90 of the 1720 and only 5 of the 597 were analyzed by PFGE and Southern blot. The study of these clones by means of PFGE and Southern blot revealed that the homologous recombination carried out with sequence A probably occurred in different regions, which caused strange recombination patterns and which, in several cases, the recombinant YACs had experienced rearrangement processes and fragmentations that were much greater than the expected ones, generating patterns that are very difficult to explain.

[0187] The five analyzed clones of the homologous recombination using sequence B provided a clone meeting the necessary requirements to be used in the generation of the transgenic mouse. The different verifications carried out in this clone are described below.

4.2 Analysis by Means of the PCR Technique, of the Clones Resulting from the Recombination in 3′

[0188] The analysis of the different clones obtained by the yeast transformation was carried out by means of a dual PCR. FIG. 13 shows the dual PCR carried out on several clones, both of the recombination with sequence A and the five positives for sequence B. As can be observed, clones b106, b108, b109, b111 and b113 behave as candidates for their subsequent study. The PCR of exon 6 of the APP gene was positive in all of them, which indicates that the clones maintain the YAC with the APP gene and, on the other hand, the PCR of the GABPA gene was negative, which suggests that these clones may have lost the GABPA gene sequences. As will be shown below, only clone b106 of these five clones showed a correct pattern in the homologous recombination.

[0189] To complete the study of clone b106 by means of PCR, PCRs of two regions located between sequence B and the GABPA gene: sequences A and A′, were carried out. In this study, the PCR of the GABPA gene and exon 6 were repeated and that of exon 11 of the APP gene was also included. As can be seen in FIG. 14, none of the PCRs in a 3 location with respect to the recombination region was positive, indicating the absence of these sequences in clone b106. The PCRs of the two exons are not as clear as in the case of the positive control, but they have been repeated in several occasions, always obtaining the same positive result.

### 4.3 Determination of the Change in Electrophoretic Mobility of the YAC by Means of PFGE

[0190] In the same way as after the first homologous recombination, the electrophoretic mobility of the YAC will also change after this second recombination, the resulting YAC having a final size of 520 kb, i.e., 40 kb less than the YAC containing clone 14. FIG. 15 shows the 1% agarose gel in which the different clones have been run: the molecular weight marker, the original clone b142f9, clone 14 and clone b106. Said gel was transferred to a nitrocellulose membrane, and was hybridized with APP gene cDNA, achieving viewing the YAC in the different lanes and the variation of the size of the YAC in clone b106, with regard to the original YAC and to clone 14, being observed without any difficulty.

4.4 Hybridization of the YAC of Clone b106 Against GABPA Gene cDNA

[0191] The hybridization of YAC b106 against GABPA gene cDNA was use to verify that the encoding region of the GABPA gene had been eliminated in said YAC.

[0192] FIG. 15 shows the pulsed field agarose gel used in the previous section to which other lanes have been added, and the same samples as in the previous lanes have been loaded into these lanes. This time, half of the gel was hybridized with an APP gene cDNA probe and the other half was hybridized with the GABPA gene cDNA probe. As can be seen in said figure, the YAC containing the APP gene of clone b106 does not hybridize for the GABPA gene sequences, whereas the YACs of the original yeast, and that of clone 14 have both genes in the same YAC.

### 4.5 Analysis of the Recombination Region in 3′ by Means of the Southern Blot Technique

[0193] The correct integration of the recombination vector in the YAC was verified by means of the Southern blot technique. This pattern, which is shown in FIG. 16, is shared by the original YAC and clone 14, whereas clone b106 has a band pattern that is different but in accordance with the expected diagram. It can be seen in gel hybridization that the band corresponding to YAC b106 has a size different from those of the previous clones, which clearly shows the existing differences in the sequence between the different clones in the region in which the probe hybridizes, which is located in the area around the recombination sequence but at 5′ from the latter (FIG. 16).

4.6 Analysis of the Encoding Region of Clone b106

[0194] A comparative Southern blot was carried out in order to validate clone b106. If the YAC of clone b106 had only experienced modifications in the 3′ region of the YAC but not in the encoding region, the three YACs (the original one, that of clone 14 and that of clone b106) should have the same ladder of bands which was described in FIG. 11. If FIG. 17, showing the Southern blot carried out, is observed, it can be seen that the band pattern of the three clones is indeed identical and that it is apparently different from that shown in FIG. 11. However, these differences are actually simply due to the fact that a better resolution was obtained in the last gel by means of using a cleaner DNA and at a higher concentration. If the band pattern of the gel of FIG. 17 is observed, some double and triple bands are better seen.

[0195] Nevertheless, the YAC containing the APP gene was what was of interest in clone b106. The same nomenclature used for the clone was used to name this YAC, calling it YAC b106.

### 5. YAC B106 Purification

[0196] Three consecutive DNA extractions were carried out in this process. As can be seen in FIG. 18, showing one of three purifications carried out according to the protocol described in section 4.2 of Material and Methods, the edges of the gel, stained with EtBr, were used to determine the location of YAC b106, and the latter was extracted from the piece of gel which had not been stained. By staining the rest of the gel after the extraction, it could be verified that all the band of YAC b106 had been taken (FIG. 18).

[0197] The three DNA extractions were measured by means of three different techniques. In the first place, by means of assessment in an agarose gel and the comparison with known amounts of a reference YAC. The results obtained were checked by means of using a fluorimeter and a nanodrop. The concentrations that were obtained for extractions I, II and III were thus 4, 7.1 and 10 ng/μl, respectively.

6. Transgenesis Mediated by Intracytoplasmic Sperm Injection, which Sperm is Incubated with YAC b106

[0198] Different microinjection sessions were carried out in order to carry out the transgenesis, obtaining a total of 102 animals born after the process had ended. The donor mouse strain of the oocytes used in the transgenesis was a mixed strain between CD1 and C57BL/6J, whereby greater efficiencies are obtained than by using pure strains. The sperm used comes from the C57BL/6J strain, such that when the founder mice are born, they have a 75% C57BL/6J genetic background.

### 7. Analysis of the Founder Mice

[0199] The analysis of the 102 mice obtained after the cytoplasmic injection was carried out using the PCR technique. A scan was carried out over all the YAC regions as a way to reliably verify the insertion of the 520 Kb of the transgene. The following PCRs were designed for this purpose: seventeen PCRs of the exons of the APP gene, one of them containing both exon 12 and 13, two PCRs of the two arms of the YAC, (both for the selection gene of the LYS2 gene and that of TRP1), and another four PCRs of sequences located between the encoding regions and the arms of the YAC (FIG. 19).

[0200] The 23 PCRs of the 102 mice obtained were carried out (FIG. 20). A certain degree of transgenesis was obtained in 17 of them, which implies that they have totally or partially integrated the exogenous DNA of the YAC. This DNA integration can be partial, as occurred in fifteen of the cases, but was total in two of them, mouse 35 and female mouse 64, which formed the first transgenic mice obtained in this research with YAC b106, thus complying with one of its main objectives.

### 8. Transgene Transmission in the First Filial Generation (F1)

[0201] Having checked the generation of two transgenic founder mice, mouse “35” and mouse “64”, they were crossed with C57BL/6J mice to check the transgene transmission to their descendants and analyze the expression of such transgene in them. Four PCRs were carried out on the descendants to study YAC b106 transmission: the two PCRs of the arms of the YAC, namely LYS2 and TRP1 genes, and the PCRs of exons 6 and 11 of the APP gene. It could thus be verified that the complete YAC was transmitted and that a fractional integration of the YAC had, therefore, not occurred. 41 F1 mice have been analyzed for the descendants of mouse 35 until the drafting of this specification; 18 transgenic mice being identified, which involves a transmission to 44% of the offspring. In the case of female mouse 64, 32 F1 offspring were analyzed, 18 transgenic mice being obtained in her descendants, which involves a 56% transmission. In short, in the two cases, the transgene transmission index to the first generation of descendants of the founders is about 50%, in accordance with those expected according to the Mendelian patterns. FIG. 21 shows an illustrative PCR of several offspring of mouse 35.

9. Conservation of the YAC b106 Structure in Transgenic Mice

[0202] The genomic study of the transgenic mice obtained by crossing the founders was completed by means of verifying the structure the APP gene encoding region in YAC b106, for which a comparative Southern blot of the descendants of the two founder mice was carried out.

[0203] FIG. 22 shows the band pattern obtained in F1, or first generation of descendants of founder mice 35 and 64, corresponding to two litter siblings for each founder, one of them being transgenic and the other one being non-transgenic. It can be observed that the pattern is the same as that obtained in FIG. 11, which indicates the conservation of the transgene structure in the mouse genome

10. Analysis of the Human APP Gene Expression in the Transgenic Mouse Lines Once the human APP gene transmission in transgenic lines 35 and 64 has been verified, it was necessary to characterized both RNA and protein expression levels in the different mouse tissues. Mice corresponding to the first generation of line 35 were used for this analysis, using a total of four two-month-old male mice, comparing them with their litter siblings. The study was mainly focused on the central and peripheral nervous system, as these are the tissues in which a greater expression of APP protein occurs. The expression in different mouse body organs was also analyzed, the following being analyzed as a whole: brain, subdivided into four regions which were called cortex, ventricles, cerebellum and mesencephalon (corresponding entirely to their anatomical contents); spinal coed, liver; lung; pancreas; spleen; small intestine; muscle; testicles; blood; heart and kidney.

### 10.1. Analysis of the APP Gene Messenger RNA Expression

[0204] The first step for verifying the correct human APP gene expression in transgenic line 35 consisted of checking human APP gene transcription in the different mouse tissue by means of RT-PCR. To that end, messenger RNA was extracted from the different mouse tissue and the RNA transcription level was measured by means of real time RT-PCR, using a Taqman probe directed towards the human APP gene. Murine GAPDH gene was used as an internal control of this experiment. To complete the study, the murine APP gene RNA levels were also measured, such that the expression levels of both genes could be compared between the different tissues once they were standardized with GAPDH.

[0205] FIG. 23 shows the human APP gene messenger RNA levels obtained in the different tissues analyzed. The expression levels are represented in relative logarithmic units, the data having been standardized for the GAPDH gene. It can be observed that this gene is mainly expressed in nervous tissues; the values being very similar in all of them, except in the cerebellum, where they are somewhat reduced. As regards the rest of the studied tissues, detectable expression levels were only reached in testicles, blood, heart and kidney, although in any case they are in an order of magnitude below those detected in the nervous system.

[0206] FIG. 24 shows the APP gene messenger RNA expression, both of the human and the murine gene, for the transgenic mice and for their litter siblings. Like in the previous graph, the data are standardized with the murine GAPDH gene. The results shown indicate a higher gene expression level in the nervous tissue, being reduced in the cerebellum. As regards the rest of the analyzed organs, they show expression in tissues such as the lung, testicles, blood, heart and kidney, whereas in tissues such as the liver, pancreas, intestine, spleen and muscle the levels are much lower and with a very important variation.

### 10.2 Analysis of the Protein Level

[0207] The human APP protein expression in the mouse means the verification of the correct YAC b106 transcription and translation in the mouse. The protein levels were studied by means of the immunolabeling technique after electrophoresis in polyacrylamide gels (Western blot). For this study, an antibody was used which recognized the APP protein but which cannot distinguish between the human and murine form, [Lamb, B. T., et al. (1997). “Altered metabolism of familial Alzheimer's disease-linked amyloid precursor protein variants in yeast artificial chromosome transgenic mice.” Hum Mol Genet. 6(9): 1535-41.; Lehman, E. J., et al. (2003). “Genetic background regulates beta-amyloid precursor protein processing and beta-amyloid deposition in the mouse.” Hum Mol Genet. 12(22): 2949-56], therefore the results must be standardized with actin to thus be able to compare the expression levels.

[0208] The different tissues of the nervous system have a lack of immunoreactivity, demonstrating the low APP gene expression levels. FIG. 25 shows a representative gel for both line 35 and for a wild mouse, the assessment of the expression, standardized with actin, is shown in the bottom graph, in which it is clearly seen that line 35 has at least twice the amount of protein as wild mice. This proportion experiences small variations among the different brain regions analyzed in this study but maintaining those levels.

### 10.3 Histological Study of the Mice Brains

[0209] One of the characteristics that the mouse of this invention must have is correct APP protein expression and processing, whereas evidence of an incorrect expression or of an erroneous processing would cause the accumulation of the peptide derived from this protein (Aβ peptide) in the brain. Brain sections of the two mouse lines, with an age of two months, were carried out to complete the study. These sections were stained with Congo red to detect amyloid. Accumulations of any derivative of the APP protein are not detected in any of the two lines or in their litter siblings (FIGS. 26 and 27), although it is possible to detect them in 1-year-old control transgenic mice (Tq 2576).

### Discussion

[0210] 1. Construction of YAC b106 by Means of Homologous Recombination of Yeasts

[0211] Only YAC b142f9, an artificial chromosome with a size of more than 600 kb, which was known to contain the APP gene but it was not known if it also contained other genes which could, as the case may be, introduce perturbations in its subsequent use, was available when designing the transgenic mouse allowing the research of Alzheimer's disease and which has been developed in this research. The publication of the human genome sequence and that of other specific studies carried out on YAC b142f9 allowed proving that the APP gene was not alone in the mentioned YAC, but was accompanied by the GABPA gene. The need thus arises to modify YAC b142f9 in its 5 and 3 regions, eliminating the mentioned GABPA gene but respecting all the APP gene encoding and regulatory regions described to date. This became the first objective of this research in order to be able to use the thus modified YAC in the generation of a transgenic mouse which can be used a model for research on Alzheimer's disease.

[0212] The homologous recombination carried out in 5′ involved the elimination of 40 kb of the YAC (FIG. 12 and FIG. 9). Nevertheless, after this elimination, 120 kb were still conserved in the 5′ region of the APP gene, which should be enough to allow a correct expression thereof according to the current state of the research. Indeed, although regulatory elements of the APP gene have only been described in the proximal promoter of the gene, the existence of regulatory elements that are farther away is considered to be unquestionable. Therefore, in order to achieve a correct spatial-temporal gene expression, the recombination has been carried out allowing the presence of the evolutionally conserved elements [after analyzing the sequence by means of comparative genomics with that of the mouse gene (FIG. 3)]. Sufficient space at the edges has therefor been conserved in the present research in order to assure it.

[0213] After demarcating the 5′ region by means of homologous recombination in the YAC, the second round of recombination was carried out, in which the GABPA gene was to be directly eliminated by means of chromosomal fragmentation. Its elimination is essential if this YAC is to be used in the generation of an animal model, because the GABPA gene encodes a transcription factor the expression of which in the transgenic mouse could affect the correct development of the mouse in a yet unknown manner which can interfere in the study of the transgenic phenotype, making it impossible to assure which gene is responsible for said phenotype.

[0214] The homologous recombination in the 3 region of the APP gene was much more complicated than that carried out in 5′, possibly due to the presence of secondary DNA structures in the 3′ region which have made the access to the recombination sequences more complicated.

[0215] As in the case of the first recombination, a series of experiments was designed to reliably verify the correct homologous recombination and the elimination of the GABPA gene. The first colony screening was carried out by means of a dual PCR. This method allowed discriminating between the hundreds of colonies obtained and reducing this number by one order of magnitude. Although apparently the colonies that did not have the GABPA gene but did have exon 6 should be considered suitable, subsequent analyses by means of PFGE showed that was not always true.

[0216] In this sense, the analysis by means of PFGE and the subsequent hybridization of the filters with the APP gene cDNA and the GABPA gene cDNA was the most reliable and conclusive analysis of them all. This is because, indeed, the change in the electrophoretic mobility of YAC b106 could only be due to a fragmentation of the YAC of clone 14. The hybridization with the GABPA gene cDNA further allow recognizing all the gene encoding regions, whereas the PCR was only directed to one of the exons. The verification by means of hybridization of the disappearance of the sequences encoding the GABPA gene of the YAC b106 entailed, together with the expected change of electrophoretic mobility, the confirmation that this colony had experienced the planned recombination. Nevertheless, the verification by means of Southern blot and different PCRs were useful for completing the study and thus passing to the process for generating the transgenic mouse.

### 2 Generation of Transgenic Mice by Means of ICSI

[0217] Transgenic mice with YAC b106 of 520 kb were obtained by means of ICSI according to processes described in patent application WO2005/098010 and in Moreira, 2003 and 2004 (mentioned above). A total of 17 transgenic mice, i.e., carriers of any DNA fragment of YAC b106Of, were obtained out of the 102 mice born and analyzed.

[0218] The verification of the complete integration of the 520 kb construct required a careful analysis throughout the entire sequence, for which 23 PCRs were carried out on each mouse throughout the entire YAC. The group of PCRs designed to verify the complete integration of the YAC (FIG. 19) was only positive for mice 35 and 64, which identified these mice as the possible founders of the new animal model.

[0219] However, the presence of the transgene in the founder mice does not ensure its presence in the germ line, which condition is essential for its subsequent use, therefore its transmission must be verified in the following generations. To check it, the clones were crossed with C57BL/6J mice and all the litters produced by the two transgenic lines (FIG. 21) were analyzed by means of PCR, a transmission of approximately 50% in the first generation or F1 being obtained (section 8 of the Results). The verification of the transgene transmission in the germ line (FIG. 21) as well as the expression of such transgene (FIG. 23) demonstrated that the group of PCRs designed to verify the integration of the YAC had been a suitable strategy.

### 3. Human APP Gene Expression in the Mouse

[0220] The first step to characterize the human APP gene expression in the mouse was carried out by means of analyzing the gene RNA expression. To that end, a quantitative plate PCR technique was used to compare the levels between the different tissues. According to the existing references, the expression of this gene occurs in several tissues but these levels are higher in the brain. And, indeed, as can be seen in FIG. 23, line 35 expression levels shows the highest values in the brain in the different regions which have been analyzed. The high gene expression index, registered in the spinal cord, must be emphasized, and this data should not be surprising because it is formed by nervous tissues where the cell lines producing this protein are located. Therefore, the results of this research as regards the human APP gene expression in mice are fully consistent with those described previously for similar mice, in which the highest RNA expression levels are in the brain.

[0221] The human APP gene expression in the different organs is to a great extent similar to the murine APP gene expression (FIG. 24), conserving the expression pattern in the nervous tissues, as well as in the heart, blood, testicles and kidney. However, the murine APP gene expression is detected in the liver, lung, pancreas, intestine and muscle, although with values that are much lower than the other organs (one order or magnitude lower), except in the case of the lung, where there is an expression similar to that of the heart, blood, testicles and kidney, which did not occur with the human APP gene, the expression of which was not detected in those organs, as has already been pointed out.

[0222] Once the gene expression in the different mouse tissues has been verified, the translation of said RNA to protein had to be confirmed. A Western Blot analysis of the amount of protein present in the different tissues which had been analyzed by means of RT-PCR was carried out for this study. The study was initially dealt with by using the 6E10 antibody, specific for the human protein, but said specificity could not be reproduced in the experiments of this research, therefore the decision was made to use the 22C11 antibody, which recognizes both the human and the murine proteins, and thus the total amount of protein could be assessed.

[0223] The high protein expression in the nervous tissues made the identification and assessment of such protein possible, whereas in the other tissues, with much lower registers of protein levels, its identification was impossible (FIG. 25). After the assessment of the protein levels in the nervous tissues and their standardization with actin values, the transgenic mice and their non-transgenic siblings protein level were compared, observing that in the former, values were found that were between two and two and a half times higher with regard to those of the endogenous protein, depending on the specific tissue. Thus, in the cortex, ventricles and spinal cord, the protein levels were slightly above two times with regard to the endogenous protein, whereas in the mesencephalon and cerebellum, the proportion increased, reaching two and a half times. It must be considered that both the human and the murine protein are being detected in the transgenic mice, therefore a total. APP protein expression of two times means that the same amount of human and murine protein is being expressed. These expression differences between the two genes is slightly higher than previous descriptions, which register expression levels between 1.7 and 2 times that of the endogenous gene, measured only in the cortex region, which difference can be due to the mouse strain used, the genetics of which can affect both the levels and the processing thereof.

[0224] Finally, a preliminary study was carried out on the mice brains, attempting to detect some of the typical neuropathologies of the disease. For the time being, no sign of amyloid peptide deposits has been detected in these preliminary studies in two-month-old mice, which is consistent with the previous studies in mice with these characteristics.

The application's sequence listing, which the Patent Office published only in electronic form, follows.

SEQUENCE LISTING (81 sequences)

SEQ ID NO: 1 - DNA, 25 bp, Artificial sequence
  Oligonucleotide APP3'-B-U used to delimit the 5' and 3' regions flanking the APP gene in the YAC.
atcctaagaggaagggatcttaagg

SEQ ID NO: 2 - DNA, 25 bp, Artificial sequence
  Oligonucleotide APP3'-B-L used to delimit the 5' and 3' regions flanking the APP gene in the YAC.
gggagaacaaacatacctcactagc

SEQ ID NO: 3 - DNA, 24 bp, Artificial sequence
  Oligonucleotide APP3'-B-U used to delimit the 5' and 3' regions flanking the APP gene in the YAC.
ccagcatgttttccaaagtatgag

SEQ ID NO: 4 - DNA, 25 bp, Artificial sequence
  Oligonucleotide APP3'-B-L used to delimit the 5' and 3' regions flanking the APP gene in the YAC.
tgaaatgtccccacactgatcactg

SEQ ID NO: 5 - DNA, 30 bp, Artificial sequence
  Oligonucleotide APP3'-1-U used to delimit the 5' and 3' regions flanking the APP gene in the YAC.
gtatagtatggatggttcaaacagagccta

SEQ ID NO: 6 - DNA, 30 bp, Artificial sequence
  Oligonucleotide APP3'-1-L used to delimit the 5' and 3' regions flanking the APP gene in the YAC.
aaggtaaagctctagaatctatcagtgcct

SEQ ID NO: 7 - DNA, 30 bp, Artificial sequence
  Oligonucleotide APP3'-2-U used to delimit the 5' and 3' regions flanking the APP gene in the YAC.
tttagaagagctcagtaagaatccacattt

SEQ ID NO: 8 - DNA, 30 bp, Artificial sequence
  Oligonucleotide APP3'-2-L used to delimit the 5' and 3' regions flanking the APP gene in the YAC.
cattttgtcgttactagtaccattggtttc

SEQ ID NO: 9 - DNA, 25 bp, Artificial sequence
  Oligonucleotide APP5'-1-U used to delimit the 5' and 3' regions flanking the APP gene in the YAC.
ctcaaaaacagcaacacagatgtgc

SEQ ID NO: 10 - DNA, 22 bp, Artificial sequence
  Oligonucleotide APP5'-1-L used to delimit the 5' and 3' regions flanking the APP gene in the YAC.
gagcttaaacaccttcctctgc

SEQ ID NO: 11 - DNA, 25 bp, Artificial sequence
  Oligonucleotide APP5'-2-U used to delimit the 5' and 3' regions flanking the APP gene in the YAC.
tggggagaggaatggaatttggagc

SEQ ID NO: 12 - DNA, 25 bp, Artificial sequence
  Oligonucleotide APP5'-2-L used to delimit the 5' and 3' regions flanking the APP gene in the YAC.
gtcatttccagaaaaagcccactgc

SEQ ID NO: 13 - DNA, 25 bp, Artificial sequence
  Oligonucleotide APP5'-3-U used to delimit the 5' and 3' regions flanking the APP gene in the YAC.
tcaaggacatggagattgggcaggc

SEQ ID NO: 14 - DNA, 25 bp, Artificial sequence
  Oligonucleotide APP5'-3-L used to delimit the 5' and 3' regions flanking the APP gene in the YAC.
ggggtaacaggttgccggtcatatg

SEQ ID NO: 15 - DNA, 25 bp, Artificial sequence
  Oligonucleotide APP5'-4-U used to delimit the 5' and 3' regions flanking the APP gene in the YAC.
caccagaccatgatgtctcagtagc

SEQ ID NO: 16 - DNA, 25 bp, Artificial sequence
  Oligonucleotide APP5'-4-L used to delimit the 5' and 3' regions flanking the APP gene in the YAC.
ctgcaaaacagccctcatattctgc

SEQ ID NO: 17 - DNA, 25 bp, Artificial sequence
  Oligonucleotide APP5'-5-U used to delimit the 5' and 3' regions flanking the APP gene in the YAC.
tagcatcctttgctaagccagttgc

SEQ ID NO: 18 - DNA, 25 bp, Artificial sequence
  Oligonucleotide APP5'-5-L used to delimit the 5' and 3' regions flanking the APP gene in the YAC.
gcttgttattggaggttccagcacg

SEQ ID NO: 19 - DNA, 25 bp, Artificial sequence
  Oligonucleotide APP5'-6-U used to delimit the 5' and 3' regions flanking the APP gene in the YAC.
tccaacgggggagtgagtgaaaggc

SEQ ID NO: 20 - DNA, 25 bp, Artificial sequence
  Oligonucleotide APP5'-6-L used to delimit the 5' and 3' regions flanking the APP gene in the YAC.
gcctcactcctgcaaacgtgcccaa

SEQ ID NO: 21 - DNA, 25 bp, Artificial sequence
  Oligonucleotide APP5'-7-U used to delimit the 5' and 3' regions flanking the APP gene in the YAC.
tctttcttccaccttggtatcctgc

SEQ ID NO: 22 - DNA, 25 bp, Artificial sequence
  Oligonucleotide APP5'-7-L used to delimit the 5' and 3' regions flanking the APP gene in the YAC.
caggatgtctctggatttttactcg

SEQ ID NO: 23 - DNA, 21 bp, Artificial sequence
  Oligonucleotide APP Ex1-U used to check the exons of the APP gene, as well as the presence of the GABPA gene.
agtttcctcggcagcggtagg

SEQ ID NO: 24 - DNA, 21 bp, Artificial sequence
  Oligonucleotide APP Ex1-L used to check the exons of the APP gene, as well as the presence of the GABPA gene.
ccagcaggagcagtgccaaac

SEQ ID NO: 25 - DNA, 20 bp, Artificial sequence
  Oligonucleotide APP-EX2-U used to delimit the 5' and 3' regions flanking the APP gene in the YAC.
aagaccgggctgattcctaa

SEQ ID NO: 26 - DNA, 20 bp, Artificial sequence
  Oligonucleotide APP-EX2-L used to delimit the 5' and 3' regions flanking the APP gene in the YAC.
tccaacgtgaattgctagcc

SEQ ID NO: 27 - DNA, 20 bp, Artificial sequence
  Oligonucleotide APP-EX3-U used to delimit the 5' and 3' regions flanking the APP gene in the YAC.
cccaagcattttggataagg

SEQ ID NO: 28 - DNA, 20 bp, Artificial sequence
  Oligonucleotide APP-EX3-L used to delimit the 5' and 3' regions flanking the APP gene in the YAC.
cctctttttcttccctcaag

SEQ ID NO: 29 - DNA, 20 bp, Artificial sequence
  Oligonucleotide APP-EX4-U used to delimit the 5' and 3' regions flanking the APP gene in the YAC.
ttgattgggttgcttaggca

SEQ ID NO: 30 - DNA, 20 bp, Artificial sequence
  Oligonucleotide APP-EX4-L used to delimit the 5' and 3' regions flanking the APP gene in the YAC.
tgttgcctcaaaatacccct

SEQ ID NO: 31 - DNA, 20 bp, Artificial sequence
  Oligonucleotide APP-EX5-U used to delimit the 5' and 3' regions flanking the APP gene in the YAC.
ctaccactcactgttttctc

SEQ ID NO: 32 - DNA, 20 bp, Artificial sequence
  Oligonucleotide APP-EX5-L used to delimit the 5' and 3' regions flanking the APP gene in the YAC.
gcagagaccttttcagtgat

SEQ ID NO: 33 - DNA, 21 bp, Artificial sequence
  Oligonucleotide APP-EX6-U used to delimit the 5' and 3' regions flanking the APP gene in the YAC.
tgccaaaattccatatggacg

SEQ ID NO: 34 - DNA, 21 bp, Artificial sequence
  Oligonucleotide APP-EX6-L used to delimit the 5' and 3' regions flanking the APP gene in the YAC.
gggatttgccaagcagcatat

SEQ ID NO: 35 - DNA, 20 bp, Artificial sequence
  Oligonucleotide APP-EX7-U used to delimit the 5' and 3' regions flanking the APP gene in the YAC.
ccactgggaggattaaaaga

SEQ ID NO: 36 - DNA, 20 bp, Artificial sequence
  Oligonucleotide APP-EX7-L used to delimit the 5' and 3' regions flanking the APP gene in the YAC.
gagaagtggacagaaatgtg

SEQ ID NO: 37 - DNA, 20 bp, Artificial sequence
  Oligonucleotide APP-EX8-U used to delimit the 5' and 3' regions flanking the APP gene in the YAC.
tgtcagtggactcgtgcatt

SEQ ID NO: 38 - DNA, 20 bp, Artificial sequence
  Oligonucleotide APP-EX8-L used to delimit the 5' and 3' regions flanking the APP gene in the YAC.
catctcaagctgtctggcaa

SEQ ID NO: 39 - DNA, 20 bp, Artificial sequence
  Oligonucleotide APP-EX9-U used to delimit the 5' and 3' regions flanking the APP gene in the YAC.
catgtcttcagcaccaactg

SEQ ID NO: 40 - DNA, 20 bp, Artificial sequence
  Oligonucleotide APP-EX9-L used to delimit the 5' and 3' regions flanking the APP gene in the YAC.
caaactgtgcccacacagta

SEQ ID NO: 41 - DNA, 20 bp, Artificial sequence
  Oligonucleotide APP-Ex10-U used to delimit the 5' and 3' regions flanking the APP gene in the YAC.
cagataggaaggggtatgta

SEQ ID NO: 42 - DNA, 20 bp, Artificial sequence
  Oligonucleotide APP-Ex10-L used to delimit the 5' and 3' regions flanking the APP gene in the YAC.
ggagcaaatataaggcagga

SEQ ID NO: 43 - DNA, 21 bp, Artificial sequence
  Oligonucleotide APP-EX11-U used to delimit the 5' and 3' regions flanking the APP gene in the YAC.
tgatgagggttggagagtgca

SEQ ID NO: 44 - DNA, 21 bp, Artificial sequence
  Oligonucleotide APP-EX11-L used to delimit the 5' and 3' regions flanking the APP gene in the YAC.
caagatggaatggacaggggt

SEQ ID NO: 45 - DNA, 20 bp, Artificial sequence
  Oligonucleotide APPEx12-13-U used to delimit the 5' and 3' regions flanking the APP gene in the YAC.
cctcgtcacgtgttcaatat

SEQ ID NO: 46 - DNA, 20 bp, Artificial sequence
  Oligonucleotide APPEx12-13-L used to delimit the 5' and 3' regions flanking the APP gene in the YAC.
caacttcatcctgaatctcc

SEQ ID NO: 47 - DNA, 20 bp, Artificial sequence
  Oligonucleotide APPEx14-U used to delimit the 5' and 3' regions flanking the APP gene in the YAC.
cacgtgaaagcagttgaagt

SEQ ID NO: 48 - DNA, 20 bp, Artificial sequence
  Oligonucleotide APPEx14-L used to delimit the 5' and 3' regions flanking the APP gene in the YAC.
ttgccacctatacaatggag

SEQ ID NO: 49 - DNA, 20 bp, Artificial sequence
  Oligonucleotide APPEx15-U used to delimit the 5' and 3' regions flanking the APP gene in the YAC.
ctggcacatcaatagcgata

SEQ ID NO: 50 - DNA, 20 bp, Artificial sequence
  Oligonucleotide APPEx15-L used to delimit the 5' and 3' regions flanking the APP gene in the YAC.
actcggaacttgggaaatga

SEQ ID NO: 51 - DNA, 20 bp, Artificial sequence
  Oligonucleotide APPEx16-U used to delimit the 5' and 3' regions flanking the APP gene in the YAC.
taaaggcagcagaagcctta

SEQ ID NO: 52 - DNA, 20 bp, Artificial sequence
  Oligonucleotide APPEx16-L used to delimit the 5' and 3' regions flanking the APP gene in the YAC.
gctcagcctagcctatttat

SEQ ID NO: 53 - DNA, 20 bp, Artificial sequence
  Oligonucleotide APPEx17-U used to delimit the 5' and 3' regions flanking the APP gene in the YAC.
accagttgggcagagaatat

SEQ ID NO: 54 - DNA, 20 bp, Artificial sequence
  Oligonucleotide APPEx17-L used to delimit the 5' and 3' regions flanking the APP gene in the YAC.
cttgagcagaatattcacgg

SEQ ID NO: 55 - DNA, 20 bp, Artificial sequence
  Oligonucleotide APPEx18-U used to delimit the 5' and 3' regions flanking the APP gene in the YAC.
cttggtaattgaagaccagc

SEQ ID NO: 56 - DNA, 20 bp, Artificial sequence
  Oligonucleotide APPEx18-L used to delimit the 5' and 3' regions flanking the APP gene in the YAC.
cttttgacagctgtgctgta

SEQ ID NO: 57 - DNA, 20 bp, Artificial sequence
  Oligonucleotide GABPA-EX-U used to delimit the 5' and 3' regions flanking the APP gene in the YAC.
tattattacgatggggacat

SEQ ID NO: 58 - DNA, 20 bp, Artificial sequence
  Oligonucleotide GABPA-EX-L used to delimit the 5' and 3' regions flanking the APP gene in the YAC.
gtaaagcaacatctaaagca

SEQ ID NO: 59 - DNA, 25 bp, Artificial sequence
  Oligonucleotide SV40A-2 used for sequencing the different cloning vectors used in the recombination.
gtgaaggaaccttacttctgtggtg

SEQ ID NO: 60 - DNA, 17 bp, Artificial sequence
  Oligonucleotide Sp6 Promoter used for sequencing the different cloning vectors used in the recombination.
atttaggtgacactata

SEQ ID NO: 61 - DNA, 20 bp, Artificial sequence
  Oligonucleotide T7 Promoter used for sequencing the different cloning vectors used in the recombination.
taatacgactcactataggg

SEQ ID NO: 62 - DNA, 26 bp, Artificial sequence
  Oligonucleotide URA3-U used for cloning the URA gene of yeasts.
gcccagtattcttaacccaaactgca

SEQ ID NO: 63 - DNA, 25 bp, Artificial sequence
  Oligonucleotide URA3-L used for cloning the URA gene of yeasts.
cttccacccatgtctctttgagcaa

SEQ ID NO: 64 - DNA, 26 bp, Artificial sequence
  Oligonucleotide TRP1 used for detecting the auxotrophic YAC sequences.
gcccaatagaaagagaacaattgacc

SEQ ID NO: 65 - DNA, 23 bp, Artificial sequence
  Oligonucleotide TRP2 used for detecting the auxotrophic YAC sequences.
acacctccgcttacatcaacacc

SEQ ID NO: 66 - DNA, 23 bp, Artificial sequence
  Oligonucleotide LYS1 used for detecting the auxotrophic YAC sequences.
accaagccagcatctgtatcacc

SEQ ID NO: 67 - DNA, 23 bp, Artificial sequence
  Oligonucleotide LYS2 used for detecting the auxotrophic YAC sequences.
gccaaatccatccacttctcatc

SEQ ID NO: 68 - DNA, 20 bp, Artificial sequence
  Oligonucleotide ProbeAPP-seq2-U used for generating the probes for the Southern blot analysis.
tgaatcttggcatttgggcc

SEQ ID NO: 69 - DNA, 20 bp, Artificial sequence
  Oligonucleotide ProbeAPP-seq2-L used for generating the probes for the Southern blot analysis.
cctgtaacttgccctcatag

SEQ ID NO: 70 - DNA, 21 bp, Artificial sequence
  Oligonucleotide ProbeAPP-seqA-U used for generating the probes for the Southern blot analysis.
gaaacgagttgaaaggcacag

SEQ ID NO: 71 - DNA, 21 bp, Artificial sequence
  Oligonucleotide ProbeAPP-seqA-L used for generating the probes for the Southern blot analysis.
tttacccttccatgaagtccc

SEQ ID NO: 72 - DNA, 24 bp, Artificial sequence
  Oligonucleotide ProbeAPP-seqB-U used for generating the probes for the Southern blot analysis.
ggcttgtaaattaaactctgaagc

SEQ ID NO: 73 - DNA, 24 bp, Artificial sequence
  Oligonucleotide ProbeAPP-seqB-L used for generating the probes for the Southern blot analysis.
cctcagtggctgttttgagagcat

SEQ ID NO: 74 - DNA, 577732 bp, Homo sapiens
atcctaagaggcagggatcttaaggacaaggaagagaagagagagagggagggatctttgatctctttctctggtaatcttaatgcataattttactaatacatgttctcaattcattcatattattaagctcttcctgcagttgatatctgagcagagtaagatttgtatttccatttttacttttttgaaagagaatatatggacagattattagtacaatttgggcactgtggttttaagaatatctgagtaaaataacaatatgaaataataaacagaagctctaacgtcaggtaacaaatagacagcaagaaaggttttgcaccatcctcttacggcctagagagttgacaagttgcttgtagttttaaaaaaataataaagtatacccttctggtatatcatcaagagcttaagaatcttggctttcatatttaaaatgcttttggggagacatatattaaaattttagccaagatgatagacatgtctcaattatatatgtgtgtgtatgtttttaaagctaaaaacattacttttagatccctagaatgaaaatttttttctcatctatgcaattcccatatggtttttttttaaatcatattttattcattttctccctttagcaattttcattttatttctcataatttgaacagagacagttctcatacatgatcagatgctttttttttcttcttaccatcatttatgcatgacataggtaatgtgactaatttctccagttgattcaagaaactcattactttgcctcaaattatatgtaaaatatttgttttacttaggttacagttatcagaaaggtagtttttttcttctattaaaatataacattgtgaaagaaaataaaatttatgctattctttgctttgtttttataaatgaatttttcatagaatttacagtatattcaaaggaagaaagataaaattattggtcatcatttgtaccttagaagtacaagaatttaagtaaaagaaatgttcatttttgttttaaaatttgttttccatgtgaagtttttattgagccaactttcatacatatcttgctagcctaaagtctaaatatttgtgttggcatcagaaaaacaaatgaggcagaattgctatgtgtggttgatcttcagataaattgactgatcacagttatttttgtatcagtctatgttattaggaaaaattgtttagttgttttctcccctgattaatggtgatattcaagtatgatacaaaaagaattgtaccaccaaatatttttgtgaggtctgctgttttccatattcattttatgctactgcctttaagaaagaactagtgtatccttgaaatagcacaaaaatgttttaaaattcataattgcaaaacaaatctgtgactaacttaatgtcttcagatctaaagggtgtaaaaatattgatacttcaatatttcacttgctgccaggaaaaacaaaattctcaatcttttgtaaatgggaggaggacttttgcatacatttttactctttaaataacgacaacgacacttatactgtcataataacaattatgtatttctttgtggttttaattttttttgtaattttacataaaacagttattttctatttttacgcagataaatatttgtgcataaaatgtaaaaatagtaaaatgagaaaaataaaactattatacagtatgtttctgtgttgcttaaaagttttttttcctgaaaacaaaatcttaaatccccaggatattttgttggatagtaatctgacagtccacttatgatacgttgtacataggattccgatgcatttttaaacttaaaagctgtcaatttgggaagaacatatttcactgaactaaaattagtaggttcatctctttgaggaaattaatgaaattccatctacaaagccaagttgttttagaatagtaacagatgaagctgtcagaaggcaagctgatgattgctaaattgtaaacctttcataaagcctttttttttaacaaacaaaaaatcacctgttcatgttggctatcagcaggttgcttcagccagaatcagaatatagaagaatggaaagggttaggaaaaagtgattcatgcctgccttcatggtgaagcaatgatgaaagtttgattgacatgcttaaataggaagttatggttagaaataaatggctttaaaaatacacagtgtgattgtatctagttcgaagcaatcaaaaaccatcagccaggacgctagtgaggtatgtttgttctcccaggacttcagttttttgtgtgtacagcttcagagtttaatttacaagccaagtatgtgtttaaaatgctttttactgataaactgacaactttagaacactgcttttaaaaatttccgtagtgaaggaccactttcttatttccaatttgtcacagacaaacatctgtaaaataaaaactgaattagtacagggagggggaaatgggaagttactgtttaatgggcatagagtttcagttttgcaagatgaaaaacaagatggttacacaactataaacatgcttaacaataccaaaccgtattaaagatggttaagatggtaaatttcatattatgtatattttaccacagttgagttttttttttaaagaatgaattactataagaattttaaaaattcagtatttaccaaattaacaatacaatgggggaggaacacattcaactcaatagatgcagaaaaatgtacaacttgacatccattcatgattaaaactctcagcaaactagagaacttctttaacctgataaaaaggtatctgtggaaaaacctacaactaacatcacgtttgttgcccctcaccactccgcccccctccccacaagatttgggaaacgcaaagaggtacctgcttttataatttttattcagaattgtatcctagtctgtgaaataaggtaagaaaaataaaaagcatacatactgcaaaaataaaactgcagaaggcatcagacatgttaaaacgcctcaagaatcaaaagttatgagaatatagcaaggtaaggtacaaggtcaatatgcgaagttcaattttatttctgcgtgctagaaactaataaatggaaattaatatttaaaaaccaccatttacaataatattaacgtgaaatagggacaaatagagcaaaatttgtgcaagacctatcaatgaaaactatagaacttgcaaagaaatgaaagaatgtctaagtaggtggagatataacaccataattctggattggaagactcaattttgggttttcttgtttttttttgagacagtctcactcactgtgtcacccaagctggagtacagtagtgcgatctcagcccactacaacctccgcctcctgggttcaagcgattctcatgcttcagcctcccaaatagctgggattacaggcatgtcccatgacacctggctgattttttgtatttttagtagagttgggggcttcgctatgttggccaggctggtctcgaactcctgacctcaagtgatctgcctggctcggcctcctgaagtgctgggattacaggcgtgagcaccgtgcctggcctaagacccaattgtgtaaatgtaaatcttgtaaatgttagttattcctaaattgacctataaattgaattacaacaaaaattctgccagtctttttttgtagacaagctagttataaaatttatatgtaaatacaaatgacacagaatagccaaaatattttggaaaaagagaacttgcactgtgctatataaagctttgctatataaagctacagcaatcaagaggtggtatttaggtaaggataaatgtatataggtcaatgaacagaatagaatccagaaatggacccacatatatggctcattgatttttggtgccaaaatcaaaggtgccaaggtaattcaatagggaaagggtagttatttcaacaaatgttagaacaactgcatatattcatggagaaaaacccttgcctcataccacacataaaaacaatggattatagacctaaatataaaatctaaaacttattaaggaattttcataaccttggggtagataaagatttcctagatattaaagaagcaaaactaggctggatgtggtggctcatacctgtaaatacagtgctttggaaagctgaggcaggaagattacttgaggccatgagttttgagaccagcctgggcaacatagcaagaccctatctctacaaaaatataaaagttaaaataaaattagctgggcatggttgtgtacggctgtagttccagctactcagaaggctgaggagggaggattgcttgagcccaggttaaaattcgaggttcaagtgcaggttgagtttgaggttacagtgaggtatgattctgccgctacaacagcactccagtctgggggtgacagagtgagacgctgtatctaataaaaaaaaaaaaagacagtaaattggacttcatcaaaaatttttaaaacacctgttatttgaaagatactattaaaataaaaggcaaggctgggtgtagtgacacatgcctgtaatttcattgctttgggaggctgactggggaggactgcttgaacccaggagtttgagaccagcctgggcaacatcgtgagaccccctctctatgaaaaaaaaaaatttaattagccaaccttggtagcatggacctgtagttctggctactcagaagcctgaggcaggaacactgtttgagtccaggagtttgaggttataataagctatgatcataccagtgcactctagcctgggtgagagagcaagaccctgtctcaaaaaaaaaaaaaaaaaaaagaaaagaaaattaaataaaggacaaggtacagattggaagaaaatatttgcaatacacttatcttacctaggttacaaaggtaagataagtgtattgaccacactgatttataatattttgtcattaagcaatgagcatcagttgtaactgaatgattatggcaatattaatatcttacaaaggtaagatatttaatatcaaaatatatgataaattcttttaactcactaagataatcaaataatttatggtcaaaggatttgtacagacacttcataaaaaaagatatacatatggccagtaagcatatgaaaagctatttggcattattagttatcacgaaataccaagtcacaatccagtaccactaaaaacacattacaactgctaaaagttaaaagactcacaataccaactgttctcaatgacatggaccaaatgaagtcacacacattgctagtggaaatgtaaaatggcacactactttggaaaagttaaacacttttgtcacgacacagcaattctaatcctaggcatttattttatgtatttatttttttgagacagagcttcactcttgtcacccaggctagagtgcaatggtgcgatctcggctcactgcaacctccacctcccaggttcaagtgattctcctgcctcagcctcccaagtacctgggattacaggcaccagccatcaagtccgggtaatttttgtatttttagtggagacagagttttgccacgttggccgggctagtctcgaactcccgacctcaggtgatctgcccgcctaggcctcccaaagtgctggcattacaggtatgagccaccgtggctggcccaatcctagacatttatttaagagaaataaaatatgttcactgaaagacttgtacacgaatgtttataacagctttattcataatgtctccaaactgttaacacaaatatccatcagcaggtgactgaataaacaaattatgaatacccatagaacagaagtacgactcagcaataaaagggagtgaacaactgcctcatcaacaactctggaaaaggcaaatctcattgtaaggatagaaagcagatcactggttgcctagggctagggataatggttgatttcctggattaggcataaagaaatttgggaggatgatgagcatagcctatattatgctttgttgacgattacatggatgaacagatttgtcaaaactcatctaaatgtatacttaaaataggtgcatggggttatgtaaatttcacctcaataagcttaaaaactgaattactagagaaatgaaatttaaaagacaaaaatacataaccactttttaaaaattattagattccacaagcataagattgctatatcaaattatcaaaattgttttaatgcttgctcttatctccctgtggactgatgacaaacagttcacggactgaccacactgatctacaacatttcatcaactgatgagcatcagttttaactgaacgattatggcaatgttaatggtatttgaaaatttctctgtaaaccttttttttttttttttttgagactgagagtctcactctgttacccaggctggagcgcagtggcttgatcttggctcactgcaacctccacttcctgagtttaagcgattctcctgcctcagcctccccagtacctgagattataggcctgcatcaccacgcccagctaatttttgtagttttagtagagacagggtttcaccatgttggccaggctggtcttgaactcctgagctcaagtgatctgcctgcctgagcctcccaaagtgctgggattacaggcatgagccaccatgcccggctgtaatgtgagaaaagcattttctcatgtctgctaacaagatagttgatttgggaatcttatttccatgatactagtaacacccagttagcacctatgctatttttataggtaacaccacagtaactagacatgaatgaaatagaacactgaagaaaaagttatttatcatatctatgagcaactctttaattcacttccttagaaaactatgcaaaaaggtttgctctaatactcacagtacgaatagagaaagtaagcttcctatctctaatgttggttttactttgtgaatgagagggcatattgcatattaatacactgataaacatcactgaatagttgaactagaatgttcatttgacttaatggttaaaggaaaaagctatgcattaagaactccatactaggattcttgtctccagctctcaaatcataaaaatagaggatttttgtttgtttttgagacagagtcactctgttgcccaggctgcagtgcagtggcacgatctcggctcactgcaaccttcaccttccaggttcaagcaattctcctgcctcagtcttccatgtagctgggattacaggtgtgagctaccacatctggctaatttttgtattttatagagatgaggtttcaccatgttggccaggctggtctcgaactcctgacctcaagtgatctggccaacttggcctcccaaagtgctggcgagaggtaacagcctgctagcagccctcgcagccctcactcgctctcggagcctcctcggccttggcgcccactctcgccgcgcttgaggagcccttcagcccgccgctgcactgtgggagtccctttctgggctggccaaggccggagccggctccctcagcttgcggggaagcgtggagggagaggcgcgggcgggaacccgggctgcccgcggcgcttgcgggccagcgcgagttccgggtgggcgtgggctccgcgggcccgcactcagagcggcctgccgccccaggcagtgaggggcttagcacctgggccagcagctgctgtgctagatttctcgtgcgggccttagctgcctccccgggggcagggctcgggacctgcagcctgccatgcctgagcctcccccctctctctctgtgggctcctgcgcggcccgagcctccctgacgagcgccgccccctgctccacggcgcccaggcccatcgaccgcacgagggctgaggagtgcttgcgcagggcgtgggactggcaggcagctccacctgcagccggtgcgggatccactgggtgaagccagctgggctcctgagtctggtggggacttggctaatctttatgtctagctaagggattgtaaatacaccaatcagcactctgtatctagctcaaggtttgtaaatgcaccaatcagcactctgtgtctagctcaggatttgtaaatataccaatccacactctgtatctagctaatgtagtagggacttggagaacttttgtgtctagctcagggttcctaaacgcaccaatcagcaccctgtcaaaatggaccaatcagctctctgtaaaacagaccaatcagctctctgtaaaatggaccaattagcaggatgtgggtggggccagataagagaataaaagcaggctgcccgaatgagcagtagcaactcgctgtggtccgcttctgtagtgtgaggaggtgtgttctttccgtctttgcaataagtgttgctgttgctcactctgggtccagctgcgtttatgagctgtaacactcaccgctaaggtccgcagattcactcttgaagccagtgagaccacaaacccaccaggaggaacgaacaactccagctgcgccaccttaagagctgtaacactcactgaaggtttgcagcttcactcctgagccagcgtagaccatgaacacaccggaaggaagaaactcggaacacatccgaacatcagaaggaacaaactccggacacgccgcctttaagaactgtaacaccgccagggtccacggcttcatgcttgaagttggtaagaccaagaacccaccaattccggacacgttttggcgaccacgaagggacttttgcctgtcgctgagcggtgagaccatcgcctatcgccaagcagtgagtaccattggaccccttttgcttgctattctgtcctatttttccttagaattcgggggctaaatactgggcacctgtcagccagttaaaagtgaccggcaagtgatctggccaccttggcctcccaaagtgctgggattacaggcgtgagcaaccgcgccgggcgtaaaagtagaggatattttaaatagaattaagtgtgagaatctgccctgttggcataaaatatattagctaattgattaaacaaagaatacctagaataaaggtataaacaaataaccttccattgtggaggatatgtaaagtggcgtgccaaaggaaagaactagaagaaacagattatggtccttttcccactaaccagatacgaaacttacagctagttgtttcacctttgttcacctccattttctctctcctgtgttggggtcgttgacacatttgcctgcagtgcagggccattggaagggttaaatgaactcagtatgtaattcatcttgcaggctcctaaataagtgtaaaggtctaggaaagaaaagcctccctccaaagaatccagtgttctaggttgaaattggtgctcctctcgcgtaatggtgaaaatcacaaagtagcgtaaaaaacatgttgaatgaatgagtaaggaataagagctaattctgatctcttacgatatgtcaagtcgtttatgtgccttctcacttatttctcacaactccttgaagtagataactgtccgttttataaatggagagattgaggcatagagggattagtcaacttggctgaagtcacttgcataagggccaacccaggcttgaagccctgcgtgggcttttcattaggatcaagtctgtctcaacagaatatagctgttaatacctacagtcaatgaaagggaggtgtgtttaacacgtctaaaaaatgagaattgcaaacattgagtatttttttcatttttcctggcttgtacttgtcttacccaaagtgagaagcttataccaaattttactttaagtagtattcatctctaataagtcaacggagttttattaaacattatcatacagccaacccttagtaaaataatggctctaggcaatcatcaccaacagctgctaaaaccactagctgaaaagttagacgctttgtaaaggatggatttgcctcacaatccctgaatacatatatcaatcttagtatcaccaaaagcgagacaaccagggccgggcgcagtggctctgtaattccagcacttgggaggccgaggcgggcggatcacaaggtcaggagatcgagaccatactggctaacacggtgaaaccctgtctctattttaaaaacacaaaaaattacccgggagtggtggcgggcgcctgtagtcccagctactggggaggctgaggcaggagaatggcgtgaacccgggaggcggagcttgcagtgagccaagacagagctactgccctccagcctgggcgacagagtgagactccatctcaaaaaaaaaaaaaaaaaaaaaaaggccaaccagataatcatatgcctcctaatatgacgcattgggacaactcttgccaaaacataaactgaacctaaatctgataaattcctcagatgtaagtaccagttcataggaaatataggacacagagagactgtcatttacatggatagaatcaacaaaaatataaaagaaaataacgttaaaaaaaattacaagaaaaaaagggaaatgtgtagattaaaagagacttaagagtgtcactcaaccaaatgcattctgtggttttgtttgtatcctgattacaataaactataaaagaaattgaggcaatcaaggaaatttgaacgctgtatttttttaaatattaaggaatggctgttctttttttcggtgtgataatagtgttgtggttataaggaggaaaggaaggaaagagaagagagagaaatggaggaaagggattttaatctttcaaaaatgcatactgaagtacttagagatgaaatagtgtgatgtctagcatttgcttcagaatatttcagtgggtggactatagattaaaacacacacacacaaaggccatgtgctgaaagcagactgggtggtagctacatgtagatacatgagggtttattatactgtgctctctgttcagagtatgcgtgaaattttccataaaatagtgcatttttaaaaaactattataaagaagcttacctaaaagaatagcacagatgcggcaatgtcacctacaaaatcatagcaggtttttaaaactgcatcactaggtaaagaatacatatttgttttcatgaaatgggcactttatgtaacaaatgtgtttctgaaaaagttgtacctaaataaaatattataagcataattgttagcagtattatatatactgtttggccccccccaaaaaagatgcatttataattttttttgcgatcctcccacctcagcctttcgctgggaccacaggagtatgctacaactcttggctaattctttctaaatttttggtagatgcaggttctccctgtgttgcccagcctggtctcacactcctgggctcaagggatcctcccaccttggcctcccaaagtgctagtattaaggcatgagccaatgtgcctagcccatagttcttgaataccaaggaagaaaagaggtttataattaagctctaaattacagaggagtggtattcctgaaaaacgtttagtaagtggaaactgcaactgtaatgcatatatgtagaaacccaagacttgcaatcacttcacaagaaacattaggcacaaattaccacaaggtaacacagcttactgacatggaaatgagattccatcaaacctatttctaaaactccttcatagtttcttattgccgtctggaaaaaaagtgcaatttccttagcgtggtgtgaaagcatggagccagtttttatctttacccagcttccagtttccatgctccttcttcctggaagcattatttatcaaccataattagcccaggtcagatttgtgcattagaaatacggtcacttagcgctgtctcctccactggattagcagccatgacgttcaggacctgatattgtctttgtttatcactgcatcttcaaaccttagttgtggccgggcccagtggctcacatctgtaatcccagcactttgggacaccgaggcaggtggattgaggtcaggagtttgagaccagtctggccaacatggtaaaactctgtctctactaaaaatacaaaagttagcgaggtgtggtggcgcatgcctgtaatcccagctactcgggaggctgaggcaggaggatcgcttgaaccttggaggtggaggttgcagtgagccaagattgtgccactgctctccagtctgagagacagagtgagactccatccgcctcctcctcaaaataaaaatccttaggtgttataatggatacagcactgtagttgtgccattagtcctcaaaattcatggtgttagcatcttatatcacttattttatagacaaagaaaaattattatactagagaactgcatttttttcctacagtttcttagatataattccatggaaacttggatctgctaaaacaatcggcagcatcaatacagcattgggaaatgataaaaggaaatctgttaaaactatcagaaatcttattaatcacatatgtttatccatttgatagataaatcatgtccctttgtcgatttaaaaataatttatattaagatatctttctgacaattattgtgacttttttgagaagcatgctttggtactatagagtatctttagcacagtgattcgtatttggataacaagagtcacaaaaggaaaaatcgcctttactttaatgcttaattatttgccataatatatttgatttgtatatgactttgtagaaactactttgtgctcaagtttgttcctctaaatagaactttatatttcttaattggccagcttgtttcattgatctgtcccaagtctcattatgaaatctcaaaatctcactttgattgatttgaaaaagtggagggaatcagaccatttggttttttttcctttgtttttgacaagatttttggtgcacagtttgagaaatggcagaattaccccccagctaaaatattcggaggctcaaaattcatactaacctttcttgtttcctaagctgaaaaaagctgccacgcagggttcttatggcaggttcttgtcaaattctcacactgaagaaaatcaatgacatatttgagagcatcaagcttcagaagaatttagcaaacaggatgtcagaaacctttcagaaataaaatcattcacctgggtggatttagggctgaaattattccatgatatgtttgataaactttcatgccactgaaaacatttctccctcatatttaggcttctaaaggttttctcgactttcttatgttaaaaattaacccatctcatctctgttgagaaataaataatgccccatatctttgaaaagataaatcaatgttaagattatgttctatgtcctcacttcatctgtgaggatgtcagaatttcttttggctgtttgtcaagtcattggcaatatcagaattatctctcagaagagaaatagttgaacttgtgtcaccctgtgggatctattgggagtgaattagattgtggaaacggcatatgctctatctgaaagtcaatctcagttcactaactagtgtcctagaaatctgaaggaggtaaggatgagaaacaatgtttcctcaaatctctctatattttcactatttcctaaaagttgataactagaagatcaatttagtatctctttggggaggagcatgagtagggactgtggtgtgtgtgggtttgtttgttttttttttttttttggagatggagtttcactcttgttgctcaggctggagtacaatggccagacctcagctcaccacaacctctgcctcccaggttcaagtgattctcatgcctcagcctcccaagtagctgggattacaggcacacaccaccacattggctaatttttatatatttttttttttagtagagatggggtttctccatgttggtcaggctggtcttcaactcctgacctcaggtgatctgcccacctcagcctcccaaagtgctgggattacaggcatgagccaccgcacccgccctgttttttcatttctgttccctctgattgaaatgcttcctctttttatccttccttttccttctttctctctgtcaaaattcccattatcctttattgtccagaattgaccagactgtccttgaacacacttcctttgaagctacactcacctgattttccacctcactgacccctacttttgggttccatactagactcctttttctcttccaaccgcacattaggtgactgtaacgttacaaatcatctatgtgagtcatcaatcttcatatccagctttgatctctcccagaatccattaatatctctatctgcttacaaggatgtatagtaagacattttaatcaaaaaatggcaaaaagaaaactcttttattttttttagaccgagtcttcctctgtcacccaggctggagtgcagtggtgccatctcggctcattgcaacctccacatcctaggttcaagccgttctcatgcctcaacctcctgagtagctgggactataggcacagcaccaccacgatcactaatttttgtatttttagtagagggggtttcaccatgttcaccacgctgatctccaactcttgatctcaggtaatctaccacctcagcttcccaaagggttgggattacaggcatgagccaccgcaccctgccctatcagtaaatattatattataaacacctatcacaaatgcataggtactcagatggatttctggagatgattctttaaatgtgtttaattatgttgattgatttttgaatcacaaactgattttgttttcctgtaatgaacccggcttggctctgatgtattattttggcatgttgctggattcggtgtacaagtattttgttgaaggttggttttttgtctgcaaacataagagatactggtctgtaattttcttttcttgttgtcaggctttcctgtgggtttttgctgtccccataactaagttggaagtgtttcttttgtctcttatttctgaacatttttggataatattgttattttttctttaaatattggatagacttcaccagtgaaaccatctagccctggagttttctttgtgaggagacttttttattagtggattacacttcttaagtagatataggaaaattaagagtttcaatttcatcttaagtcagcttggacaagttgactctttttccaagaaatttgtccacttcatccaacttgtcatatttgttggcataaaattgctattatccattgtctatagaatctgtggtatatcttgctttcattcttgacatcgaaatttgggtttgtctcttttaaaaaaaaaaaaaggtcttgctagggatgaatcaatttcattgatctttttaaggaattaatttttggctttgttaattttctgttatttgttgtcttctctacagatttatgcttttatctttattgctttctttcttgtttgggtttaatgtaatcatatctttctggcttaacgtgaaaacttatgtcactggtttaacacatttacttattttttgagaatccacagaccatttattaagataaatcttatttgagtccatagacaagtcttgataaatttaaaaggattaaaaccacacaaagtatgttctctgactataagggatttaattagaaatcaatagcagaaagatacgtagagaatacccaatgatttggaaattaaacaatacattaaaaagaatttttttactatatacatttaaagctgtgcatttctcctaaacatagcttcagctccatcaaatacattttagaatgtcgtacttttattataattcagtttaaatatatactaagttcctttgtcatttcctattttgcacacttggattatttcaaaatatattatttaatttcaatatctatcacagtggcttttgtcattgtgagaagttacgaagattccaaatttcttatgagtgggtattgtttgctcataaaagtttagcccattaaaaatgatgtggcatatgaaataacataacattttatttccttttttattacttctttgtaaaatccaattttaaacattttattaaaagcaaaaagttatgatatagtattaaaatatttcattttgggctgggtgcagtggctcttgtttgtaatcccagcactttgggacaccgaggcaggtggattgaggtcaggagtttgagaccagcctggccaacatagtgaaaccccatctctactaaaaatacaaaaaattagctgggcatggtggcaggcgcctgtaatcccagctacttgggaggctgaggcaggagaatcgtttgaacctgggaggcggaggatgcaatgagccgagatcacaccattacactccagcctgggcaacaagagagagaagctgtctaaaaataaatttcggtttgaagaatacatacatcagtatctatatatgtaaatcacatgtatttatgtatatgtgatctttacaccacaggtaacttaaaaaatgtgaatgctgttccctaacagacctttttactctcttcagaaacttcataacatggatatttgaaggaaatcctagagctgaatttaaagacggggtttgaggagacttgagtcattctgtatagtaaaataagattttgttgttttgtcattgtttacccataaaatgagggaggagagctaagcactatgcctatgaagcctgcattgcagaatctttcagcaagattaatgtcaaatgtggaattttaagatgttgacattactatatgtcaaagagtgttataacaaagtatcattaaccagtggcttataaacaacagacatttatttctcacagttctggaggcttgaaagtctgatatcaaggtgctggcagatttggtgtctggtgaggacccacttccgggttcatagatgacgccttctcaccactgggtcttcatatggttaaaggggcaagacagctctctgggaccaattttatttatttatttattttgagatggagttttgctcttgttgcccaggctggagtgcaatggcacgatctctgctcaccacaacctccgcctcccaggttgaagcgattctcctgcctcagcctcccaagtagctgggattacaggcatgtgccaccaccccggctgattttgtattttttgtagagacggggtttctccatgttggtcaggctagtcttgaactcccgaccttaggtgatccacccaccttggcctcccaaagtgctgggattacaggcgtgagccaccgcgcccggctgtctgggaccaattttgtaagagcattaaacctattcatgaaagctctgccttcatgacctaatcagctcccaaaggccccacctcctaacaccatcaccttggtgactaggtttcaacatgtgagttttagggagacgcaaacgctcagagtatagtagttatatccttccatgtccactatcgccacctgcacatgtgcctctcataaaaatgcattgaaaaggtgagtttggaggcaattaaccaaaaatctacccagttttagatttaggaaatgtaaatcttaaggaatggaaagccttcctgcagacgtctaagttgtgtttgggtgtgtatttatttgagtatatctgcatataagtgttaaagaatcggaggacaattcactaatacacattcgttatctctagaaaaaggatttttaacacatttgcttattccaatttctactataaaaatagatcactgtagtcatactcccacttatggttaagatggtataaccagaatgaggtaagtctcatttatttatcagcttaaactgagattccagggttgcagcatgcagagagagtagaaaccactgggaagccaagacagctagagttcacagagcagagagaaaaaaatcgcacagagatcaagcttgggagatctgcaaagggttcccctggggctgtccagtgagacctggtcagtagatatacacgggaggatcctacccaaggctggggaaggagccacgtgacaggagcacagggaacaatcctcagagcatacacaggagaagtaatggttgtgcttccaccagccagagaggaaaaccttataaggcatagagtactcggaatgctagagactaaaggctgccctgatcctacctgacaaagtttaaaaagaaagcctagtcccagcggggcgtggtggctcatgcctgtaatcccagcactttgggaggccaaggcaggtggatcacctgaggtcagaagttcgagaccagcctggctaacaaggtgtgaaaccccgtctctactaaaaataaaaaattaaccaggtgtggtggcatacacctgtagtcccagctactggggaggctgaggcaggtgcttgaacccaggaggcagaggttgcagtgagcaaagatcgcaccactgcactccagcctgggtgacagagcaagactcagtccccccccccccaaaaaaaaaaaaaaaacaaaccagcaaagcctagtcccagaataaaatttaaaatgacttttgggaataaaaagtaatagattattgttaatttccattactttaaaatctgatccattacatattatatgcgtgtatcaaaatatcacatatacccccaaaatatatacaactattatatgtcaattttttaaaagttgtacccagtcttcaaattccaactaaaatgctaactgattccttcatctgaatttttgtagcattcttttatggcaattaacacagtctatattttagagattttatccaattgtattgtaaatgggttttatctattaggttggtgcaaaaataatagcgatttttgcaattacttttaatggcaaaaaccacaattactttcgcactaacctaatggttgtgctgtaaattcccaggggatagggaacacccaagattcatacaactttgtgtaaatatgttaaccatcttgcattattagtgccttacataaatctgattttaaaatatatatttgcccagtaaatgaatatttcagtaaagtttaataaaaaaatataagtattaactggctattaattcatatgaatttatgtagaagtcttcttaaaaatttgagagttaacttaagaatcattctcatatcattattgccagcatgttttccaaagtatgagcctaaatatatggactagccagttctcatggccattagtgtacacttgtaaaattatttttatttatgttggaatttgcaaagtctattttcaaatccaactgggattatttttatggcagagattattacagcggtatttctaagtcatgtagaaaaaaatgtgaatctgggaggttctgtgatgcttagagatttcagttccaacttgttccagttgatgtcactatggcaaaggtatcccacacatgtggcatacagcagcgggggaaggaggatacaaatctaataatgtggccaaatcaagaggaaacgtatttgggggcaaggctaaaatgggaatgggagcatggcagaacatcaggattccacatctggaatcagaggggctgagtgaatgcatttacctgatcttctatgagtcagcaaaacaaacacacaaagccatcgtgagtttggaagctgtgaaactgctgctctttgcaatgacagatcttcctatgctctgaactgcagcaatacattgaggtagcagtaattacagactttcatatggcttctctgctctgtagaagtagtaaatgaacctcttggggctaaatttctagctttgggctcctgcaccatctttctccctacaggaagtcacgacagacaacagaggaagtccaaagcaaggacaacgctgtttatgaaaaggagtggtaatggttcagagtgaaaattaacagatgttgggataaaaatgtctgcctgggtactttatggctccaaagtaaataatatgtccctgagttttagcagctgtttagggactcctgtatcttagtgttagtttaaacggcaaggtaaaggaactcatgtaacttaacactgttcatcaacacaaacttactggatatctttctgaaatgtgaaaacagatctgttttcagatactattcaactgtgcaaggaggcaaacagatgtattcattaacactccccacagagcatattgtgatatttgcaaatggaaaatgctggagctgaggttacacaaatgttttctgttatgaaacttccttccataagaccatgattttcaaggaggatctcatttaggactgttttttgttgttatactttctgtaatgggtgatttttctaattaagataatttgcattttaaccttgttttagaaagtgattattctttttttttctgtctaaaggtagataatgttacctgtttaaattcatttttttaacccaagttttgcctcaggatctataagtcaattttttatagtaagatattggatgcccagtgaagaaaaggtttttgccaagctgaaagaaattcaaggcaagattgtgagatgtcattggtacaatacacaccaactaagaatccttgtttctgttttatgcctatgaaccaataacagtgatcagtgtggggacatttcattggaattctgcctgagaaaaagcaggagtgttcagtccttcagcgccaccaacagctctggatgccaaaggaccatgctggtagggctcagagtgctcagacagaagtatgaggcagagtttcatggggaaatgagatgggtctgagatgggtaggaagagggggaaaatgggcctctcaatgctctcatagcctcttaatgctctcaaaacagccactgaggcaatgaaatttttttttaacttttaggttcagagatacatgtgcaagcttgttatacaggtaaattatgtttcaagggggtttgatgtacagattattttgtcacctaggtaataagcatagtatctgataggtcgttttttgatcctcaccctccacccaccctccaccctcaactaagccctggtgtatgtggttcccttctttgtgtccatgtgttctcaatgcttagcttccacttataagtgagaacatgcagtatttggttttctgttcctgcctttgttcacttaggataatggtctccagctctgtccatgtttctgcaaagaacatgatctcattcttcttttatggctgcatagtattccatgctatattgtaccacattttctttatccagtctaccattgatgagcattcagattgattcctcatctttggtactgtgaatagtgctgcaatgaacatgcacatgcatgtcgtctttctggtggaataatttgtattcctttaattatatacccaataatgggattgctaaggtcgaatggtaattctaagttctctaagaaatcaccaaactgctttctgcagtggctgaactaatttacatgagcaccagcaatgtatgtatatgagcattcccttatctttgcaacctcaccagcatctgttatttttttacttttttataatagccattctgactggtgagagatggtatcccactgtggttttgatttgcattaattaaaagagatttatttatttatttatttgagacagggtctggctctgttgcccatgctggagtacagtagtgtgaacaggctcactgcagcctcaacctcccagactcaggtgatcctcctgcctcagcctcctgagtagctggggctacgggtgtgcaccaccacgtctggctaatttttaaattacttgtaaagatggggtcttcctatgatgcccaggctggtcttgaactcctgggctcacgtgatcctcccactttggcctcccaacatgctgggattacagacgtgagccaccacagccagcctgaaacgagttgaaaggcacagggagaacccaggtttctgtggactccaccaggacatgatggaaaatggaccttgaatgaaattccttgattacgtggctaggaagactcctggtatctgctgtggtaacttcaagccacagaggagagacagaaaattccctgagtccgggggataatagtcatgacaagggtgaaacagaaaacgaaaaaaaaagagaggaagggttgatacctgttgacagaataaacactacaaaggaaaatcatccttgtaaagtaaattctgtcaacatgaatcttgttcgtcaaatttgattttaatattgagagtaagatagttttcagtttgtctgctgggaccatgatgaagcactttcttcatctagaatttccctggtgatctttctggggatatttttctgtatcccaagctttcagcaaattttgatgtgttgcccactttgtgtgaagagagatacaaaagaagcttatgtgacccctgcttccccatgtgcaagacaaaactggcccctaatgaattgagatgagattcccaagatttggggacttcatggaagggtaaaattacaaaacaataacaatgttctagttttctaaggctgccataacaaagtcctatggactaggtggctttaacaacaggaatttatttcctcacaattctggaagttagcaatccaaaatcacggttggtttcttaggtcttgagggaaggacctgttacacacttctctctccttgacttttgacggatttcttttccatgtgtcttcacatcatcatctttctttttctttccctccctcccttcccctctctctccttccttcctttcctttgtttttttttttttttttgagagagtctcactttgtcacccaggctggagtgcaatggcactatcttggttcactgcaacctctgcctcctaggttcaagcgattctcccacctcagctcctgagtagctgtgattacaggcacataccaccacgcctggctaatttttgtatgttttggtagagatggggtttcaccatgttggccaggcttgtctcgaactcctgaacttaggtgatccgcctgcctcggcctcccaaagtgctggggttatatgcatgagccgccacacttggccatgtcatcttccttctgttgcttgtctgtatcggaagttcctcccgttattaaggataccagtcaaaaggtgggttattaggcccaccctaataacctcattttaattaatttacctttttaaagactctatcttcaaatacagtcacattctaagtttctggggtttggacctcaatatatgaatcaggggcttggggacagggggaacataattcagcccatagtaagctacaacaacaaacccacaagccaacaacctgaggtggatgacacatgctttcaaaatttgtattttgtaaaatcagaattaaaaaacatggctgggtgcagtggctcatgcctgtaatcccgacactgtggaaggctaaggcaggaaaactgcttgagattaggagttcaagaccagcctgggcaacacagtgagacaccccatctctacaaaaaatttaaaaattacccaggcatggtcatgtatgccttgtagtcccagccattcaggaggctgaggtgggaggaccatttgagcccaggaggtagaggctgcagtgagccatgatggtcactgcactccaggctgggtgacacagcaagaccctttctcaaaaccaaacaagcaacgaacaacaaaacaaaacctatgacattataatttaataaattaacagaaaaaggatgtactagtgatgtaatcaaagaataaaggagtattctttaaatacatttaactttttaagcatctcatatatttatccttattttttaggaccagtgaaattttgaaattttcattagtaactggtgaggatgtgctgaaatacattacggtaattgtaacatggcgccctaggtaaaatttggttctaatattttcaaaaccttaaatatgctggtagaaacctcgcaggaggtgaggcctaaatatatcctgagaccttgcttctgggaaaaccaccagaagggattatttgattatatccatattaagctgatagtttaaccaaaagagtaatttctaaggaggtagaatgttctgtgacatcatgagagaatgagagagcaagagtgacatagaggagttgaggaggtagagcagcccttttttttttttttttttttttttttttttttgagatggagtcttgctctgtcgccaagctggtgcaatctcggctcactgcaacctccaactcccttgttcaggcgattctcctgcctcagcctcccgagtagctgggattacaggcacgcaccaccaagcccagctaatttttgtatttttagtagagacggggtttcaccatgttggccaggatgatctcagtctcctgaccttgtgatccgcctgcctctgcctcccaaagtgctgggataacaggcgtaagcatcgcgcggggccgggtggcatttttataaagagtttatttccctttttaaatttaagctacactatgcctatgatctgctactctttcttatggaggtaggggtgtgtgcgtgtgggtgtgagagagtgtgtcttgttcttgttgttgcttctgttgttgttaaagaaattattcatgagtgatgcagggttgagacttagccattgatagaaaatacgtgagggcagatcttcatctcacacaaagagggaactcaagtgataaagtagaattgagcctggactataattttgatctcttgcatgtgaagctattaaaacagaatcatacatatttggagaaaggttctgatattatactaatgtattctggtgtgatttcttaccgatgccctatgacaaattccaagccctataggcaaagtttttgttgatgcaaaaggatattctcatcagttatttcagaaagaggtgcattctaaatgaggaaattaggactgacaactcagtccttagattggcttggcaaggagaaactgtatggcacctgtttctgttgtatagatctttgctggtagcacgggataccagtgtcaggagactagctcaaaggtactctgtctgggtagaggattacatactttctatcctcatgcacactgggccaaggcatccggtaaagatggctcctggacgaagagctctgaaagctgcagtatccattggcagctgaaataaaactgtgtattgcattgaaatgactttctgtcattcgagttaagtcctgaacgttgagttaagtcttactaaaggctgcaacctgtctcagttgtgctgagcaataaaagagtaggttccatgtttggtccatgtgggagggacttccgctctttagataatatattggtcctgatgttattaaattcttattttattcattataaatgttttacatgaactaaaagtattgcattaaaatatttattgcaatcactgagtttttctgtgcctctgcaaattttacaccccattatcagcactgattatttcaactataaaacgtcatgatctgttttacagtgagacaaggagttttaagtttccaagttcacaggaaatgaaacaagaaatgtaacaatatggttttatatcacattttgggaggctgaggcgggaggatcacttgaggccaggagtttgagagtagcctgggcaacatagtgagtctcctgtctctttaaaaaaataataaaacagtaaaaatttttaaaaatacaacttatcaaaatttgtgggatgcagtgaaagcagtgcttagaaggaaatttatagcattaaatatatatattagatgaaaagaaatatctaaaatcaataagctataggaaaggaaactatagaaaagaataagagtgatgcaaacagagaaaaaaataaaaattagagcagaaatcactgaaattgaaaataaaccaaagaaaatgaacgaaatcaaagctggacttcagttaataacattgtcactactggttcaataattgtgacaaatgtaccatactaatggaagatgttaataattgaagaagctggctgtgagacatgtctctgaactgtttgtattatctctgcaaatctttaaatacatagctgttacaaaaacaatgttttttaaaaaatattaaatatctggtttgagagggtgaattcattactaagcaagttggcagtatctgcttttaaaaaagctttgagaatgacactaaggacccatattttagagatggctcagatccgacatggccaagactcaggaaaggcatattttgggttccttttgaagtgtgaaatttgagtatgaaattgtctgagatcttcaagcagtcaccttccatccatttccaaatgggacaggatataaataagtttattgcttttgaaagatcatgtgtaaaagggctacaaaaacaaggacatggagaaaaggcagaaggtgcttctagaaataggattttaaaaagtgaaagttctgcgttaacaagacttgcaaaaaaactgcttaggttggcaagagctattttttgaaaaaggaattttgaaggaaagatcagaggtacttgtcccacataaggtctgctttagaaaagatgggatattaatattgctatgtcacctaattttgacttttagaacaggaacaccccaaataacaagggtggtgtaacaaaatagaaagcttgtctcattctcatattgaatttggagccaactgaccagggcttggtttcctcatctgtaagatggatgacaacagcacatcatggtgatggtcatcatcatcataactattagactgtggccgggcgcagtggcttacgcctgtgatcccatcactttgggaggccgaggagggcggatcacctgagtaggagtttgagaccagtctggctaacatggtgaaaccccgtctctactaaagatacaaaagttagccgggcatggtggcaggcgcctgtaatcccagctactcaggaggctgaggcaggggaatcgcttgaacttaggaggcagagtttgcggtgagccaagatagcagcacttcccaggctgggtgacagagcaagactctgtctcaaaaaaaaaaaaataaataaataaataaaaaataagaatcacaaacacatgtatgcacaacccaaacactgacagagaaagctctgtaaatgaacatcctaagcctcattcacacaggacagctttatagatttcttaacatccctgtttttagctatagaattgctaattgtgcaacaaatgctatagaggtgctcgcttggcataaaaaggaacagtgaaatccataagcctgaaatccatcagcatactgaaaaccaaaatgtgggaatactttgggaaggaagtatgtgtgtggtatgggagagagcactggctttgcagccaggtagatttagattggaccctgtcagagccactcactcatagcttaaacttggagactttgcaaacttcgttttctttttagttttttttggagacagggtctcactctgtcaccccaggctgaaatgcagtgacatgatcatgggttgctgcagactcaacctcccgggctaacatgatcctcccaccttagactcctgggtagcggggactatagttgggtgccaccacgctccgctaagttttgtattttttgtgtggagacagggtttcaccatgtttgccaggctggtcttaaactccactcctgggctcaagtgatccacctgccttgatctcccaaagtgctaggattacgggcacgggccacggcacctggcctgcaaatttctttcgtcctgcatttccccacctgtaaggtgaagatgttccctggagatctgtattgttaacgctcttaaaccagtgacacacccagaaactaggacagggatgctattagaataagaaaatatgagaaatatgaggataggaaaatgtttcaaagcaagttgcatgtaatgtaaactagatctctgaagacagggctgttatcttcctgcctaaaataagtggttctgtattatggaacttagctttagctggtggatactagccatgacattttgactcaatgaacaataaactcttccactgtctcacttctcaagaccccccagatgtaacctgctaaaacacctacagattattaatttttattcatatgctctctgacttggtagcaggggagaggcacttaacgttctttagacagaagatgaagaaacagacagtatgtcaacaaattgttagtgttaggagccctttaataacttcagcgaggcatccttttaggagctctaaaaataagcttcaaatttaaagtggcacctagagagctgagattacaggcgtgagccaccatgcctggccctatatttaaattcacgtgtatgcacaccatacccagaaaaccccctttgaaaaaaataacaaagttatttctaattggcaacatacagagttgtacagcttattgtttacaaaataaatcaaactcttaaactgaacgacaggaaagtgagagtttaagatgagagcggttttctgcaaattgggaccaatacctattttagtcaccattccaggtctcctgttatctgaatagtgtcttgtctgatagactaaacttacacaccattactattgttgataatgctaataaactagaaatcaatataatgaactttagcctgaaattccttaaatataagtctttgcattatgcccaaggtatttttattgtattgtcttaaaatttagattttaacatttcgttaagtttaacgtaagaaatgtattctttaagaaaaaacttccactttggatgttttttttggaagaaaaatgccagggacatcatcatacctagagagatttaaaaacagaatgaagctaaaaccaaaaatttggttttatacatttttttgagatggaggttttgcttattgcccaggctggagtgtaatggcatgatttcggctcactgcaacctctgcctcccgggttcaagtgattcttgcctcagcctcctgagtagctgggattacaggtgtgcgtcaccacacttggctaatttttttatttttagtagagacaggagtttcaccatgttggccaggctggcctcaaactcctgacctcaagtgattcgcctgccttggcctcccaaagttctgggattacaggtgtgagccaccgtgcctagcccaaaaatacgtttttattacagaaaaaaagttggtttctttggtacagatttttttcccccataacaacttgctataaaaaagtaagactcacctctcttcttccagcaacccccagggaataagattatccatccagtagagaatagaactaggaaagataaatccctctttgacttctgatattctatttttctgatgttttctgtacctccattactggtttgacataatatttggcctttgagtttttaacttttcccagttgtcattcttgagaaagtgaaaagataataagtttcaacataaatttggagtaagctccagttttcacacaaacacaaatcacaaggcacttacaatgtttcacgagctacaagtcttttaaaaataccacctattagccattgaacacagggctgttacaaacttatttatcagaggacatagttgctatgctctccatataacaacagtttcaaaaacttgcagccattaaaactacatttttttggccgggcgcggtggctcatgcctgtaatcccagcactttgggaggccaaggcaggtggatcacctgagatcaagagttcgagaccagcctggccaacatggcgaaaccccatctctactaaaagtacaaaattagcccggcgtggtggcacgtgcctgtagtcccagctattcaggaggctgaggcatgagaatcgcttgaacccaggaggcagaggttgcagtgagctgagatcacacctctgcactccagcctgggtgaccaagtgagacttcgtctcaaaaaaacaaacaaacaaaaacctttttttcctctcaaatcttttgatcctgaattaatacagaatcttattcaagtggatgctaactccattgtgtggaactttttttcttttctttttttttttttggacagagtcctgctctgtcgcccaggctggaatacaatggtggaatctctgcctactgcaacctctgcctcccgggttcaagcaattctcctgcctcagcctcccgagtagctggcattacaggcccccgccaccacgtccagctaattttggcatttttagtagggacggggttttgccatgttggccaggctggtctcgaactcctgacctcaagcgatccccctgcttcggcatcccaaagtgctgcgattacaggcgtgagctaccgagcccagcctctttgggacatttcttcttttctaaacatacagcagtggtggtgaaaatataaaatgaagatataaaaaggcatagtgatgctcaaaacccaaattagggtctgtgtagactgggaagcagcacttggacagagacagatgagtgagctgaagatccaggactgtggttgtgggtcggagttgggctctgtcgggataaatcgctccgcagaagacgggctagagtctgctcaccattgaaggaaaggccagtgcggtttttctgcccctgaaatgttattcagaactcctgctgctgacactttaccactcaggtttctgcgacagttgggtttctgtggacctgaagaagagggaggacacagactcacaagccggaacggcatgcgacgagccccccagaggcccataactgaactgcagtgtctccagccgcgccctgtgcaatgatttggttctgcattgcgccccctagaggtgagtggaagcaatgtccaagctgtgggcaagtaggattgagtacccgaagggagtgaaagcaaaaagcaaaacgcaaaaacagccaaggagcctgcaaaccaaatattgagaatgcatgaagaaatgcaatgccaagaaagaaaactgcaagatcatcatcaagtaaatgtgggtcagataaaaataataggacaatctgaaagaagactttcacataaatatttaaggtacttcaagggaaaattaagagaaatattctaaaaaaaaaaaagtaaaaggtagagaaaaaaatgtaagacaaaataggcataaataaaccaactatgggtaaacatgaaaaataactgattagaaatatgaaaaataaaaatcataaatataccttaagaaattggataaagtatattggacataattgaaggagaaaattagttgatgaaaccattcatgcagaaatagtggatagatggaaggctttccccatgtattcaaaagaaggtccagaaaagaaaatggagggaagagtagagaaattatatttaaacagtgactagctaaggctttctcagaatcaagttcaaacacaagtttttaaattaggagagggctgggtacagtggctctcacctgtaatcctagcactttaggaggctgaggcaggaggattgcttgagcccaggagttcgaggctgcagtgagccataatcacattactgcaacactacactccagcatgggcaacagagtgagatttttgtcgcaaaaaaaaaaagtaaaagttaaaacataaaataaatttactagaagggtagttcaagtaccaagaataatgaaaaataaaccaaaataagacacattatagtaaaactaggaaaatttaagttactgggaaaaaagattaccacatattaataactgaagttattatcagcaaagatagatgcatagagtgaaatagtatcttaaataaccttaaaggccataattattagcctagtgttttatacccagagaatgagggctatactaagagttggccacagatgtcttcttaattaaaaacaatactggttgggcatggtggctaatgcctgtaatcccagtactttgggaggccaaggcaggcagatcacaagatccaggggttcgagaccagcctgaccaacatggtgaaactctgtctctactaaaaatacaaaaattagacgggcgtggtggcacatgcctgtaatcccagctactcaggaggccaaggcaggagaatcgcttgaacctgggaggcggaggtcgcagtgagccaagatggcaccactgcactccagcctgggtgacagagcgagactccatttcaaaaagaaaaataaaaaataaaataaaaacaatactaacaacaaaaaactattaaaggatatacttcagcaggaaaaaatctgaacccaaagaaaaggcattgagatacaaaaatactgtaaatatggaaactgataaaatattttggtgagaataatatggactatgtaaataaaattatacctctaagcaagaagaaaatgaaagagcagaaaagcaataatgaagcaaataaaaagtatggtgatcaggaagatcaggaaaagaaaaagcaaagaatgagaataagaaaatagaaacaattccagctgtgtaaataatcactaacggtagacagattaaactcaccttttaaagagactgaaatgatcagaatggataataaagcaaaatctagctgcatgttgcctacaagaggcataggttagaattttaaaaataaagggatgtatagttatgcaaaatgggaacagtgagtgagaaaagggtgctaaatacctccttgcacattttttgctgtggcaagtttctgtgaatatatagttatttcaaaatagttatcaaaaaggggagtggataaaaagctatagcattcaagtatcaaccgagataaaggggcatagcaatattaataccatacaaaatcgaatataagacaaaaagaatttaatagggataaaaagatcagtccataataattgaaagaacaatccactgagaaaatataataattgagaacctgaatatacctataataaaacccagaactgtatgaaacaagttcttatggaattaccaggagagagaaaaccacatagtagtaagattccagtatatcactatcagaatctgataaattggaccaaaattagtaaggatgagatttacaaaatacattggctttatctgatagatacctagaattctctctctggcaagcagacatacatttttagagagtatttacaaaaagtgtacagggcatttcaaaaattaaccacacactatatcactaaagaagtttcagcaaatgtcagggattgaatatgacatagacaatgtgctcgcctcatcattcaattaaatggtaaatcaacaaatctgctttttattttttattatttttagaaatagggtatatcactttgtcacctaggctggagtgcagtggtgcaatcatagctcactgcagctatgattgaacctgggcttaagccatcctcctgcctcagcctctctagtagccaggactacaggtacgtgccaccatgcctgactaatttaaaaaatattttgtagaaatggaggtctcgctatgttgcccatgctggtcttgaactcctgggctcgagcagtcttctggtcctggcctcccaaagtgctgggattacctgtgtgagctatcatgcccggcaaagtcagtttttaaaactattcatatggctgcaaacctaagaacttacttcaaaagaattcccacaaaagaattaacaaaattcttagaactgaatgataattaaagtaagtatatcaaaatatatgggattcaaatattcacattaatttctaactttaaatgcactcgtttaaaaaagaaacaagaaagaaatgagtgaagaaggtgtctcaagagctagataaggctgggtgtggtggctcatgctgtaattcctgtactttgggaagccaaggtgggaggatggcttgtccgcaggagtttgaaatcagcctggtcaacataatgggacccccccaccatctctagccccccccccccgaattgtttttaattagctaggtatgctggcctgcacctgtagttccaactactactgaggttgaggtgggaggatcacttgagctcagctgtgaggttgaggctgcaatgagttgtgatagcatcaccatactccaacctgggtgacagagcaagactctgtctcttaacaaacagctagataaatgtaaggaaactataagaacagaaataaagacagaaatacaaatgaatgagataaaataggaaggaatagaaagggtcaaaaacgattaggattaagtaaaagagaacaaaaatatatgaaatttagaaatcatgagtactttgagcaattttataccaataaacctgaaaaattgtgcaactgtaattatctaggaagaaaagtattaacaaactcaagaaaaatagaaaaaaattgatacccattttaattacactgatattatcaaagcctcccttgataggtgtttcatggactcaaatatgtgtctcaaatctaatggcagatgctgaaaattgcaggcaggttatttaagacagtcattttactcatgaataattctgtgtagttctctttcctctggagagaagtagaggtttttcatttaacaatgattaatttttttctagtttatcctggggagtctggcttgttataaacaatactggaggaataattttttggtaaataccgtttgtctgccaaattgatgatctctttagagagtgtttttgttgtctggttggtgtttttttttgttttgttttgttttgtttttttttttaagagatagggtgtcactctgtcacccaggctggagtgcagtggtacaatcatggcacattgcaaccttgaacttctgggtttaagcaatcctcccacctcagcctcctgtgtcactaggactatagatgcatgccaccacacccggctaaaattaaatttaaatttaaatttaaatttttaattatttttttttttggtggagatgagggtctcactatgttgcccaagctggtccccaactcctgagttcaagtagttctctcatgttggcctcccaaagtgctgggattacaggcgtgagccactgtgcccaaccaagataaattcttgactgtggaatttctagatcaaaagtttcagtgcacttactggttgagaaaacaccatcccaggcaccatctcccagtgctgcagaggggaagactacatggagttagaacagctagagttccaggactaaccccaccctgtcacacatcctttctcacttagctactgccagaacaccaaaccccttcaatctgtatgtctagtgagatcatgtaatttattgtctgaacttggacatacactaaactgcatgtcaggatgacacatacatgcggggacagccttggggggttttgtcatcttactcatgacccctattgttcaaagcacgtctcccataaatctgacttgatcctctgtacccctgcccctaccacgcccacacccatatttttcactgtggccttcaggtctgcacacagcagatctgcatacattcggtctctttgcgaaatgtttcttttgcttcctgaattcaccagaaatgcagctctccgttgtgaacactcttctccctttgacttggtgctgcattttaggtgttattgaccgggttaagggatacgcagaaacatttctgggtgggtctgtgagagtgtttttggaagagattagcattcgaatccacagactgagtaaagaggatctgtcctcatcaatatgggtggacattattcaatctgatgaaagcagggatagaataaaaaggtggaggaagggtgaatttgccctctcttcttgagctggggcatctatcttctatccttgaacactggagcttctggttctcaggccttcagactctgggacttacattactgagaccgctggttctcaggcctttgacctcagattgagagtaacaccgtcagcttccctggctctcagatcttcagaccaagactgaatgacaccaccagctttcctgggtctccagcttgcacacagcagatcatgggacttctcagcctccataattgtgtccagttcctataacaaatccgctgttacatatcttatacaaatcctattgcttcccttcctctggagaacttgaccaatacacaccctcttcaggggagctattttttctcttatactccttgtatatcagggtgagaatataaaattcaaaggcttccttcttgcatttcactgctatttccagaccatttatccatctttttggggctggggagttgggggaaggaaagatttcactctatctttgaggcttagactacctgacttgaaatattccctcctctttatggctgttgtctggtggcatccctaccactcctcctcatggctgaggatcgactgtcagctataaacatttatctctacatagactgccatcacaatgaccagcaacttcaacaattaacatgatagattggctctttgatagtattatgtagtggccgggtgcggtagctcaggcttgtaatcctagcacttttggaggccgaggtgggtggatcacctcaggtcaggagtttgagatcagcatgacctacatggcaaaacccaatctctactgaaaatacataaattagcttggcgtggtggcacgcctgtaatcccgcctactcagaaggctgaggcaggagaattgcttgaacctgggagacggaggttgcggtgagccgagatcgtgccactgcactccagcctgggtggcagggcaagactccgtctcaaaaaaaataataaataagaaaagataatattatgtagttactgttattcattttacatttgataatgtagtgtggaagttttttcaaagagtccctttaaaaattagatgccaatctgatatatttacacatataagcatgtgagtgtctggatttgcttccaatggtaaaggaagattggccatgagttgataatgactaagatgggtgatgtatggatggaggtttattatgccctctctactttttatgtttaagggttccgtaacaaaacagcaaatgaatctgggtgttccaaaccaccatgagctcttttttccttgactgctactcccatggaatcactcagtgtcatagtcagacttaaccttgtcagcccagaaattaccacctccaaaattcccatgtcatgcctctcattctcacagcactactgcctgtatttcaagctcccttacttattctaggaaattccagcattctcaacctcattaagagttccattttggctgggcatggtggctcacgcctgtaattccagcactttgggaggccgaggcaggcagaccacttgaggtcaggagtttgagaccagcctggccaacatggtgaaaccccatctctactacaaatacaaaaatttgccaggtgtgggggtgggtgcctgtagtcccagctacttggaaggctgtggcaggagactcgcttgaacctggaaggcaaaggttgcagtcagccgagatgccactccagcgtgggtgacagagccagatgacaatgtctcaaaaaaaaaaaaaaaaaaatttttttttaaaagtgctccatttcattgacccaaccaccacattctctcttgttcctcatcccctttgtgtattcatttgcctcctcgtctagcttaaatgatgttgaaaattcttgccacgtcttcaactcccttgctttttttctttctgacatacttgactaaggaaattctgacagttgaagtctactgtctgccatcctgggaccagtggttgagcagctgaacatttttaggagaaattcacccaaatgggctgacttatttatctttaaattcatgtttacaacatttgaactggcattcaacactgtccagtaacctaccaaaattttcctaatgtctgcctaccaagatgactaattcatcagcctctcctctttcatcaatcctgttgcccaccaattatagctgatgatatccttcgcgcatcactaaagtgataaaattaatctgagagaaatattttactttctgattaactaaatcttcaaacctcttacatctgcattcccttcttcctatctattctttcctttccctaaataacaatttctccacatgctgtcagaacaattttccttcccaggaacttagcttctttgatggtctgcactctgtctgcattactagtctactagtttacactggatcattcccaccagggcctaggctagctgggacttctcaaactgaaatttgcacatgagtcatctggaagtctcataaaaatgaaaattatgattcagtaggtctggggtggggcctgcaattcttcatttctcaaaaactccaagctaatgcatgggttcatgcatctcattctttgagtaacaaggctttagtgcattttagaatccaagtaacaggtgtacatatggtagaagtacaagcagaagtgatatgagaagtaccaagcacagcacaggtatcaagcctcaaaagaaaaacaggccatatctctgcagaagcaagcaccttagggccttctgctaggtccaggtcgaactgtttagtgtgcagattatgaactggtccagaactgtccagtggcagttgtggggattggggagcttagagcagtggattttaacaactgtgcttgagtatttcaacaatcagtaatttgtaccagtatgtaccagctgaatgcagcaaatatggtttggatattcatctccaaatctcatgttgaaacgtgatccctagtgttggaggtggggcctagtgggaggtgtttcagtcatgggggcagatctctcatgaataggggtgctgtcctcatggtaatgagttaatccctctgtgagttcacatgagatctggttgtttaaaagtgcctggcaccccctccctctctctctcgctttctctctcacagtgtgatgctcccgatcctccttcaccttccatcatgattgtaagcttccttagtccttgctactagcagatgctggcgccatgcttctcatacagcttgcagaaccatgaaccaaaataaaccttttttttttaaataaactacctagtctgagatattcctttatagtgatacataactaagacagcaatctttatgtcatatgacaaattttagaagaaattaacaaaatattcagagagacagctctgagctcaagttgggaagaatattcttacagtgccaaccaaaagtgaagtgggctgagtgaaaaataatttcctattcctgaaaggatttaatcccaagtgaagtatttgtcacagaatacatagagaattgtttgggttacagaaaaggggtccagatccagacctcaagagaggattcttagatctcatgcaagaaagaattcagggtgagtccacagagtaaagtgaaagaagtttattaagaaagtaaaggaataaaaaaatgctacgccacagagagacagccctgagggctgctggttgcccattttatagctatttcttgatgatatgctaaacaaggcatggattactcatgcctcccccttttagaccatatagggtaacttcctgacattgccatgacatttgtaaactgtcatggcattgtgggaaggtagtagtgatgatgaccagaggtcactctcatcgccatcttggttttggtgggttttagccagcttctttactgcaagctgttttatcagcaaagtctttatgacctgtattttgtgctgacctccgatctcattctgtgacttagaatgccttaaccaactgggaaggtagcccagtaggtctcagcctcattttacctggttcctatttaaggtgaagttgctgtggttcacacctctctgacatttgaactagataatttaagattccttgaaaccttagattcaatgagttctactccagtagagaactattatcactccagtgtcatcttaaaaaaaaaatctaaaactcaattggacttcaaattgcagtttacttgacgtcacagtttacagactgttcagattttttcagaaagaaaaattttaaaatatttaatggatcaaaaatagatattctttcccaatctttctaattcttttctaattttctttttctttccttattgcacctaataagtaaatttttcaagagcatagaaaaacagtcaataaacaaaaatcagtttctgaagactcgtggtaaacagttggaaagtgaaattatgataaagaaaaacatttacaagcaaatgcagccagaacatgatatacttagggataagctgaacaaaatacatgtaagacctgtttgtatacccaaaactacaaaatagtgcttgaagaagtaaaagaagacataaataaatggaaagatataccatgtgattggaagatttaatattgcttagatgacaatttttcccaaattgatctatagattcaatgcatccctgatcaacattgtataggctttttttttcagtagaaatttgagctgattctaaaatttatgtgaaaatacaaaatacctagaatacccggggcaatttagaaatagatgaacaaaactggaagacttacactacccaattcccaacctaccttcatcatgactgtgacattggagtaagactcaatggactaaaatagagaatctaaaaaccttgcttatatggtcaattaaattttttttctcttttttttgagacagtgtctcactctgttgccaaggctggagtgcagtggcaccatctcggcccactgcaacatccacctccgcgttcaggcaattctcctgcctcagcctcctgagtcgctgggattacaggtgcgtgccaccatgcctggctacttttttgtatttgtagcagagacggggtttcaccatgttggccaggctggtcttgaactcctgacctcatgatctgcccacctcggcctcccaaagtgctgggattacaggcatgagccatcgcgcctggccagtcaattaatttttgacaaagttgctaagaaaataaaatgggagaataatagttttttcaacaaatggtactggaataattgggtatctgtatggacaaaactgagcctcaatcatggtatcacaccatacgtgaaaattaactaagtaaatcattaaatataaaagttaaaacttctaaaagaaaacttctaaaacaatcttgaagtggaggcagatttcttagaacatgaaaattgctataacctatataaatgtgtaaataaatgggactttatgcaaattaaagagtgtctatcttttgaaaaactatgtcaagaaaccgaaaaggcaagccacagtctgggagaaaattgcaatatatttttctgacaaagaacttgcatccagaatatacaaagaactcgaactcaatgaaaagtcgacaaaatattcgaacaaacattccaataagacgatataaaaatgaccggctgggcgtggttgctcatggctgcaatcccagaacttgtaaaggccaaggtgggtgaatcgctcgagccccagagtttgagaccagcctgggcaatatagggagacgttgtctctacaaaaaataaaaaatgaggtgggaatgttgcttgagcccgggaggtggaggctgcaatgagccatgattgtgccactacactccctcctgggcgatgggagtgagaccctgtcataaaaaaataaataggtcgggcgcggtggctcatgcttgtaatcccagcactttgggaggccgaggcgggctgatcacgaggtcaggagatagagactatcctggctaacatggtgaaactccgtctctactaaaaatacaaaaaattagccgggcgtggtggcgggcgcctgtagtcccagctactcaagaggctgaggcgggagaatggcgtgaacccgggaggcggagcttgcagtgagccgagatcgcaccactgcactccagcctagacgacagagcgagactccgtctctgaataaataaattaattaataaggctaatattaccataagaagatgctcatatttatttaggcatcagaaaatggagattaaagccctattaagataccactacacatcctacctctgcgagaatggccaaaattaaaaagactgacagtgccagttttggtgagaatgtggagtaactgggactttcaggtattattggtgggagtgaaaatagtatggtacgcaaagctgcaataatcaaaacaaaactggcatggagacagaccatagagactagtggaatggaatagaaaaaacggaaataacccctgtcacatatggtcaaataatttttgacaaggttgctaagatcattcaatgggaaaagggcagtcttttaaacaaatggtactggaaaaactggatgtccacatgcatgacaatgaaattggtcccttactttacaacgtacacaaaagttaactcaaagcggatcaaagacctaaacataagagctaaaactataaaactcttagaagaaattatagcagaaaattttcatgatgttaggtttgaaaattatttctcggatatggcaataaaagtaaaaatagataaatttgactaaattaaaatttaaaacttctgtatatgcgtatgaatagccaaaatcaacaaatgaggaaaaagcaacttacacaatgagaacatacttacaaatcacatttctaataaggggttaatatccataatatacagtataaagaactcctacaactcagcaaagaaaaccaaacagtccaattttaaaaacgggcaaagaatttttttttttttttgagatggagtttcactcttgtcacccaggctgcagtgcgatggcgcaatctcggctcactgcaacctcagcctcctgggttcaagcgattcttctgcctcagcctcctgagtagctgggattacaggggaccaccatcacactaaggtaatttttgtatttttagtagagagcgggtttcaccagttagccaggcaggtcttgaactcctgacctcaaatgatctgcccatctcagcctcccaaagtgcagggattacaggcataagtcaccacacctagccttagggcaaataatttgaatggacatttctctaaagatgtacaaatgagcaacaagcacaaaaaagatgttcagtattactaatcattagggagatacaaatgaaaaccacaaagagatactactattaaaaaacctgaaaatagcaactgttgctaaggatgtggaggaactggagaaattcactgttggtgggattgtaaaatggtgcagatgctgtggaaaactatattgttttcaaaacaaagattgaatataaaattaccatatgatcaaaccactccccttctggttatacatcgaaaagaattgcaatcagggtctcaatgagatacttatccacccatgttcacagcagcatcatttaaaatagccaaaaagtagaagctaacccaagcgtccactggtggataaataaacaaaatgtggtatgtacatacaatagaatattattcagcctcagaaaaggaaggacgttctttcttcttcttttttttttttttttttttttttttgagaaagagtctcactctgtcgcccaggctggagtgcagtggctcgatctcagctcactgcaacctccacctcctgggttcaagcaattctcctgtctcagcctcctgagtagctgggactacagttgcatgacaccatgcctggctaatttttgtatttttagtagagatggggtttcaccatattgctcaggctggtctcaaactcctgacctcaggtgatccacccgccttggcctctgaaagtgctgggattacaggcgtgagccactgtgcccagccaaagaaggacattctgacacatgctacaacatggatgaacctagattcaggacattatactaagggaaataagccagtcagaaaaagataaatactgtatgattccacttatatcaggtacctcaaatagtcaaattcataaagacagaaaatagcatgatggttgccaggagctggggaatagagagaatgggaagttgtttaatgggtacagagtttcagttttgcaaagtgaaaagacctttggagattggttgcacagcaatgtgaatgtacttagtgctatcgaactgtatacagtcatccctcaatatttgtgcaagattggttccaagatcctgctcattgccaaaatctgtggatactcaaatcccttatatagaatggtagtatttgcatataacctctgcacatcctcctatatactttaaatcatttttagatcgcttataatacccagtacaatgtaaatgctatgtaaatagttgtcagactgtgttatttgtattaattttttaatgttgcattttaaaaaatattttgactgctctgcattcggatgaatctatggatgtggagcctgcagttacagaaggcctactgtacttaaaaatggttaagatggttacttttatgttaattaatttttaaaaattaattttgaatagtatggtacaacccctttggaaaacacattggcacttttttataaagtttttttttttttttttttttttttttaaaacagaatcttgctctgttgcccaggctggagtgcagtggcatgatctcagctcactgcaacctctgcctcctgagtagctgggactacaggcctgcaccaccacacacagctaatttttctgtttttagtagagatgaagtttcaccatgttggccaggctggtctcgagctcctgacctcaagtgatctgctgcctctgcctcccaaagtgctgggaattataggccagagccacgcggccggcctcttttctataaaattaaatgtacactttccataatatccagaaactccattgctacacttttacccaagataaataaaaacatgtcctcaaaatgacttgtatgcaaatgttcacagcagcttaattaatagccccaaattggaaagggccatcaataagtaaatggataagcaaattgtgatatttatacaatgaaatactttttagcaatacaaaggaatgagctattgacacatacaacatgggtgaatttttaaaatattatgctgagtgaaagaagccaaaacgaaaaagtacttactgtattattccatttatacaaaattctagaacaggccaaactaatctgtaaaggtggaaagcagatcgtgtcaaagggagaaaacaaaattgacccaaagggcatgagacgggggtgatagaaatgttctgtattttaagtgtgttgggggccatgtctgcacgcagttttggagcaagcaagcaatactctttcttggtcaagcaaatgaaagcgtttcccagattctgataaaaggagcaagagactctctgctagaatattgatttgttccctgacatttacagtgaggtacttgaagaactcccaccaaagctattcacaaatgtgaagctgcagagttttatgtacggtcgtgggtgttacttgccaacatttaccccgactttgctgtactctttcagcatgttgatattctcagtaattttcaggcctttttttttttcctttttttcccttgacttctcatcagctccaaacctcagatctctgtttccttccaatacaatttctgagtccagagtgacatgaagactgacatagctcacccacgaaattgaagtccattgaaaaatccccattgcttggcttacagtccacctttctgtatctcaaaagcatttgattaatctctcctgatttcccaccatgatccatgtggtggttgcaccaggcatcctctctcttcttcttcccacaacttgtctttctgccagggactttgcttccagtgttactgagaagataaggccatcacatgtgactccctcagttacacgttattcttcatgttatttttgattctgcgcttccagctttgccagcaacctaagcctaggtaggtgctcttcttctctgttcattcttggtgctgtagtggctggtgggggttcattccacatataagctattcattgccattaaggctttcacttgcccgttttaaacaattttattccatacaaaaatattccagaactttttgtacaagtcactgcctcatttaccatttgtaccaattgtactaattatatcaatgtacctgcccacaaacaatgtgtaagagggattttcactgcactcaacaatccttagagaggcaataaagcatagtgggtgaaagagctccaccaagtactagccacatgaccttgactgaattagtttgacttctgtgctttagtttcctcatctgtaaaacagggataaataataagacctagtagggatgagttgttgcaaagagtaaatggctggtagatggaaaacacttggcgtagtgctatataatagtgcttagtaagtgctatacacacactaaatctgtgcgtgttggtagctgaaagtagctctgttggggatttcttctataagtaataatgttgaacatttattcacatgtttttggtcatttgttttcttttgggaaatgccttttcaagtcctttgccaatttgtttttgtttttgtttctttttcaaccctggcctacagaactttgccaatttgtaatggcccacaaatatttcttcactgattttcaagctgtttatgagctacggctattaactttctgttatcccgttttattattcgaaaatagcttttcggtctgttattggcctttatatttgtttatagcatcttaacattttttttttcttctatgactagaagattctttccattattgtatcacttaaagtttctattttctgtattttctccttcctcccatccccagtctggcaactgatagaaagtgccttgagctctttggaggaaagtgcccatctgaagtgctcattattcaattttggggctgtttagtaaataataataatgtttctaaagagataactccatactgtacttgtaaatcaaggaatttgtcctccagtctcctcaaagagtgaggctattactagagaagtaccatcattggctgaaaaagatggacatttgaaaagccacatataacaaatgttaaaaaagaagcctccttcttgagattgaacactgtcttctgtagacttccctcaggaaatgaacctccgagagctgctgttgttgcctttgcttctctggccgtttgtcaagctaaattgagtggagctcctgtgtgttgtctgtttaatcgccctctttgacagaagctttctcattacctacctggccctgttgcaaaccagcgcctggaggcagacatattgcacaccatttcctccagggtcttgctgcaggttgtctctgggaagtaatgaaaatctggaatgttctcagtgggcgggcttcagacccactgccccctgccatgaaccctcagcaggccagcaatgtagtaaaagccattagtgaagaaatctggaggagttcacctctaggcaggatgatttgacttttggaagatattctggagttagccaagatatttttatctgaaaattatttctgtcttataactgttccctggaggctctaagaatagcaaaaactgacaaattttgtttttgttgtggtttactttcctttaatctgctaacgaatctttttggctccacatgaggctgtgtctctgcagctgcattcttcagggctgtttcccctcagtgtttggggtattctggcctttgatacagaatcttaatcttaagctgtcttgccatgacaggtgttcattttgcccaagacttcttagtttaggtgaatgtcaggcagaaactcttctctcttcaaaaagaaacattagagcagaataagaaaaagcaaaaccacctttccagagcctttttaataaagggattcttctgtgtttataggttgtttcatgaccttgaggatgacttgcaggcaaaataaattattcagaggttaccttggttttcaaattaataagcaggttgttaaaggaatgctttcaaagccctacttcttagatttcaaatcttacacgtctagcaatttgtttttctttttttttttttttgagacagagtctcattctgttgcccaggctggagtgcagtggtgcgatcttggctcactgcagcctctgcctcccaggttcaagcaattctcctgcctcaggcttccaagtagctgggacttcaggtgcatgccaccacacctggctaatttttgtatttttgataaagatgggttttcaatatgttggccaggctggtctcaaactcctgacctcaggtaatccaccctcattggcctcccaaagtgctggcattacaggtgtgagccaccatgcccatccaagtctagcaaattttaagacacacaagggaatatagtgggttgaacagtatcccccccaaaattcatgtctagccagaacctcagaataggaccttatttggaagtaggttcattgcagatgtcatttccataaggatcaagatgagatcatactggatttgggtgagccctaactctaatgagagtgcccttcttagatgcaggaaaacacacacacacacacacacacacacacacacacacacacacacaagaacgccatgtgaagatggagacaaacactagagttaatgctgccacaagccaaggaattccccgagccaccagagacttgaaaagtcaagaaaggatttttctttttcttttttggagacggagtctcgctctgtaatccaggctagagtgcggtggcgggatctcagctcactgcaacctctacctcctgggttcaagcaattctcctgcctcagcctcctgagtagctgggattaacaggtacccaccaccatacccagctaatttcttttgtattttagtagagatgtggtttcaccatgttgcccaggctggtctggaactcctgagctcaggcaatctgcccgcgtcagcctcccaaagtgctgggattacaagcatgagccacagcgcccagccaggaaagaacttttctaaagaattgtcagaattgtctgtgagagcatagccatgctgacacctttattccagtcttctggctctggatatgaaaaaaaataaaataaatttcgggtttttttgttttgttttgttttttcctgagatggaatcttgctctgtcacccaggctggagtgcagtggcgcaatcttggctgcctgcaacctccatctcccgggttcaagcgattctcttgcctcagcctcctgagtagctgggattacaggcgcctgctaccacgcccggcgaatttttgtatttttaatagaaatggggttacaccatattggccaggctggcctcaaactcctgacctcacgtgacccacccgccttggcctcccaaagtgctgggattacaggcgtgagccaccgcgcctggccaaatttctgttgttttaagccacctagtttgaggtaatttgttacagcagccctagaaactaatataagggggtttgatccttggctttatttacaaacttaaatttctttaaacaaaacggaagctaaggtatttgattacctttttaaatatttcagttatctaacaaactttccaagacacttgtgtcttgatttaattagctatttccctatttcgaacacctctgttgctttcatttttttcttgaaatcataaaaaatatagcaaagtgtacattaattgtaaactatatgtacatttctttgcaaaggtagactctggcattaaaactgttagcatttgggctggtccagtgtgcttggctgatgggagcacagtgctgatgagactaagatgccaattagccctaaagagagaaaagctgtgtcctccatggcccggctagaacgtttgattcacttaacaggtgcatgccactgggcaaccagggagagatgtacccatccattattgttaaaggataaaactcaaacatttatattggtttctctgatgacaccaactttatgttttgacaaggaacattatttatactaatatgtgaaaatagctaaagcttcattcagacattaatctcataggaaatgtttgcacaaaaggcagggagatggaagaccaagacttcacatgacatttcatcacagaccaatggcagaatgagctacagaatgcagttttaacactatatgtctagtggcataatccttctagctttaactggcagctttttttttctaggactaaagccaccagcataataaacatcttttagatctgccttcaccacagaactgtttttaggaaactcatctatgatcccaggattcactgtttgaaaggagttgctggtgttaccttcagagaccttaaattggtttgaaattatatagtcactaaagagattgtgattgttattttaagtttttttttttaatttgagatggagtctcactctgttgcccaggctggagtgcagtggcacaatttcagttcactgcaacctctgcctcctgggttcaagcagttatcctgcctcagcctctcaagtatctgacattacaagtgtaggccaccacacccagctaatttttgtatttttagtagagatggggttttgccatgttggccaggctggtctcgaactcctgacctcaagtgatccacccacctcagcctcccaaagtgctgggattacaggcgtgagccactgcacccagttcattttaaactatgcctcagttttctcctttctaaaatggggatcacaaggacaactacttgatggagataattaatacatgagtttaacataatatgctcagtaattggtacaaaaaaatagcataaataagacctactatttgatagcacaacagggtgactatagtcaatagtaagttaattgtgcattttaaaataattaaaagtataattggattgtttgtaatacaaaggataaatgctggaggggatggagaccgcattctccatgatgtgatttttgttgttttttttttttttttgagacagagtctcgctctgtcgcccaggctggagtgcagtggcgcgatctcagctcactgcaccctccgcctcctgggttcatgccattctcctgcctcagcctcctgagtagctgggactacaggcgcccgccagcatgcctggctaattttgtgtattttcagtatagacgcggtttcaccatgttagtcaggatggtctcgatctcctgaccttgtgacctgcccgccttggcctccgcaagtgctgggattataggcatgagccaccgcgcctggccatgatgtgattattatgcattgcatgcctgtatcaaaatatctcataagtgtgatatacatcctccatgtactctcaaaaattaaaaattaaaaaagaacatgcttaaaacagcctttaaactagtagccatatataaatgttagctgttacttcttctttaggctttggacaaggaacgtatcttttctgtgtaccagtctatttccagtgccaaactatagtgccaagcaaatagtgagtgctcaatgaagatttgcaagcgacttaatagcaattgaaggaacacagagggattgactttgccttgccttcttgacctgttttatgtttttgtttcccttaaactttataatttagggattaggagcagctggttgcttatgttcataactcaaaacacaaaaagagctcagcgggtctaacagggagcgcagcaatgtctttcactgcttagacggtgaacggctaaagtttatttccacgttaactgttttcattgatgaaaactggttagaacattatttttggagtgttagatactgaaaagattgactgtaaatccataattttcacagctgtgttctccaaaattttctttactcctacaagtgaagaatgaaaattacagaaatatatctatgtgtgcataggaagtcgtttgcttttgggaattctccagttggtaattcagttaatttgctacagtaacttacgatctccttctcagagttaacttcctgatcctcttgaattgcaggtgtatttgtcaggtgtggacaggcaggtctgcggttgggcttgcgtcttcctcaacagttctacttctgccaactgggttataaaaagctctgctgcaatctggtggtttaacttgaggtatagtttccccgagagacgacgttaggccttaggtttcataaccagaccaagcaattcaattaatcttactatccatgaagggtaattggatgtaaatagcactagagaatccagccatcgtttatgacgatcattgtaggggctgtttttaggctgtcaatttagtgagctagaaatacatctttcttaaaagtgaaattagggactacacttctctccatcctccatttgctgtctttgaaggtgaagtgataattctggccaggcgtggtcgctcacgcctgtaatcctagcactttgggaggccgaggcgggtggatcacctgaggtcaggagtttgagaccagcctggccaacatggtgaaaccccatctctatgggaaatacaaaaaaaatagacagatgtggtggtgtatgcctgtaatcccaactactcgggaggccgaggcaggagaatcacttgaacctgggaggcacaggttgcagtgagccgagatggcgccactgcactctaggctgggcaacagagtgaaactccatctcacaaaaacaaaaacaacaacaacaacacaaagaaagaaagtgatgatgcttctagtcttcccctaagtaggagatgactcctctggacaaaggatgagaatgaagagtcagggggaagcaggaagccctggaaaacaagaaccatctgctgggtaacctctgagcttagtctgccttttttgaagttcccagggcttgatttatggcacaccatgaactctgttgttacaattctttatttccaattacagcatgatcttcttattgaatgatgagttcctagaagattgatccttgatataccctttatcatcactgtttaatcacaacgcctgccacatagtaggggctacataattgttgaaatgaaatccctccagtttctaacctttcctaacctgttcaggagaattatataacttgataggttcttcactacctttcctgtcgctcaaggaagaactcagctttcttgatatatcttgtgaatttcattccaaaaaagtgaaataaaaatagggcatctatttctacccagaccctgtagagaacgacaacaggccatgtatctgataggtgtgttggccatgtgtcggtgtgctagcctgtgtgaaccttggtccctgtaaggagagggtatccccactaagtgagtccccgtccgtggtaattgtactctatgccagacagtcagataattctgagtggtagagatcggctggatttccaatgtaccctaacaatagactgtgttctatcctgccttggtttacctgagacgcttctgcatctttttttttttttttttttttttttttttgagacggagtctcgctctgtcgcccaggctggagtgcagtggcgggatctcggctcactgcaagctccgcctcccgggttcacgccattctcctgcctcagcctcccaagtagctgggactacaggcgcccgccaccacgcccggctaattttttgtatttttaatagagatggggtttcaccacattatccaggatggtcttgatctcctgacctcgtgatccacccacctcagcctcccaaagtgctgggattacaggcgtgagccaccgcgcccagccgaatcttttcagcctgttccaactcttacctctttatttgagttaccatgactaggactcaattgctggagataaaaaaaatcttgaccaagacaatacaggtagttctttaaggaccaaaaaaaccccatcttctacatttaagaggaaaaccaatctcacaggtctttacaggaacagagaaggacagcagggttagagatctgtacatacattgatcaagtcaggtgtggttatgtgctggacctcagttggaagagagcgaattatctagaaactcagtgaggaggaaagagagcagggataactactgatagtagagcatgtatgtccttgatcgtcgagaaggtgaaggcagaattcatttataagtaaagaagattcatggtatagagaccagatatgttaggggatgatggccttttattttattcctggtagactcacttgaggaataaacgtggagcaccagtggcttgtgcttaaatatgtcttctgtatattttgctcagtagaggcttaattgggataatttctacttctaatgtataaaaaagccagtggttagcacaatttccagaaatattcacaatgtgttccataggaatgatttccccctagtctcatttttgagactagaaccctctggaattacacaatatgggaatcttgtgtgtaaaaagtgtagaagaattaagcttactggtaatatacatcttgatgtcaatcatttgattcattttcttactttaatgatattaacctgtgagatggatttttgattgatggaccagggtagtggctttcagagagaatgccaagaacaccagtgtcttgctccgtcttaactcccaattaaaaaaaaaaacttttaaaataaactttttattttagaatgggtagagattttcagaatagctgtgaagatagtacggagtttccatatactccacacccagcttcctctgttattagcatcttatattaatatggtacatttgccataattaatgaaccaatgttaatattattaactaaagtcaatactttctcttttctttctctttcttccttccttctttccttccttcctcttttatttccttccttccttcctttccttccttccttccttccttccttccttccttccttccttccttccttccttccctgcttcctttcccccctccttccctccctcccttcctcccttccttctttgacagagtctcacctctgttgcccaggctgcagtgcagtggtgccatcacagctcactgcaggcttaaccccccagactcaagtgatcctcccacctcaaccttctgagtagctaggactacaggtatgtgccaccatgtccaactgattttttgatacttttgtggagacagagtctcactatgttgtccaggctgatctccaactcctggcctcaagtgatcttcccaccttgacttcccaaagtgccgggattgcaggcatgagccactggacctggcctaaagttactctttattttacttctttttttttttttttttttaattctagggagctatgactgcaagggctaccatatgtttattgtaatactcaatggtttcctctatgtattgaagctactctattctgaatatggttcttaagccttcctaaccgtaaaaatcacattggagctttaaaaatgcatgttgctaggttcccccactgaagatcctgatttatttgggcaagggagtcgctgggcaagaacctacctttttttttttttaaaaaaacaaacacaggtgatgctaatacaatagtctctagactacatatattttgagaaaatagacctaaactataaagggaaattaagaaatccttagtaccacttagaagttgccatatctatttctgtgatgctaaaggaaaattttactgtaagttgttttttttggcatcaccccagagcataacacacaattagtatctaactcaatcatttctcttcttaaaagcactttgctgtccctcttggatgggcagggccactttccaatgtgctgcaatagcattttgttaaaaccaacatctcatgttaacacaactatttgtgggcttacacaacaagaatagatggagaaatatatcccgggaaggaaaatattattattaaagaaaaacctcaactgactagccacatttttatcctgtagggatagcagaattcacatcatggaaatttttatgttttcctttagaaaaactacttacggagccctttggttataaaacaaaaaggcccggacccatctagattagagaagaagaaagggagctaaactgatcttcatgatgaacttcaacggagtcattcctgaggatggagggaatgatctatgctggaaagggctatgtgagttttctttaaccaggctccagaaggaataggtttccaatccctggaacttagagaagccagtgcagaaatgggctgaagcaacgtgatgaaagagtgagatgctacagaagagacaaccagggagaggttccctggggcagagaatggtggatgagatttaggatcagtgttgccagattctgtctgttgcagattattgcctttttatcctagtcctttgtatacaatagccttgtgttagtgggtcatgttttaaagcacaagaacaaggcagattggacagacctaaagcagtataaggaggtagagtcagatggcccaaaatgatgaaagagaggattggagtaggagtcgggtctgggactcctcagaattataggtgagtgtgctggatatcctcattcatatgcatggcacttcgagttatttgatctggactcataatggcagacagacttaaggactcagggttatattaacaagaaataccctaaagattcttttgtcttcctgcagatctgaaagatgaatattgatagaaacttttgtaacaaaggcatatctctcctaccatttttcctctgattatgttgttctagttgtctgtgattcttattgtcagcacagtgctgaattttcaaatagactcttgcttatgaagctggcagtatttcattatttatgactttgttcaacttcatctagtctaaacacaaagtagatagaagttgtgtttttctattgctgacagcaaaattctcttgcgtgaacatatttctttacacagacaaaagatgttgagcaaggcatgatagtttttgcacagtacagctgaggaggatggatggaatgactgctgcaatataagaaactaagaaaaaattcagggcaaaagatcccaatctatataagctagtaaaactgggatataaacatgaaaattaaagagatacattttcctgtagcctttgtgccataaattatatgaaaagggtgaccaatagaagagagaaatttgttctttaatcctctgggaaatgctaaggagtcatttctttttttttttttttttttttttttttgagacggagtctcgctctgtcgcccaggctggagtgcagtggcgggatctcggcttactgcaacctccgcctcccgggttcacaccattctcctgcctcagcctcccgagtagctgggactacaggcgcccgccgccccgcccggctaattttttgtatttttcgtagagacgggggtttcaccgtgttagccaggatggtctcgacctcctgacttcgtgatcttcccgcctcggcctcccaaagtgctgggattacaggcgtgagccaccgcgcccggccccttagcaattttaaggtaacatattaataggttattgggattaggacatatacaccacagattgactatagatttcatgttccaattcattcatttttttcaccagagccactgaggaaatttttaatataagtcatgaaaaacgatggggcaaaattggaattgcatgattccttgcttccagtaaaaaaaaaaaaaaaaggttaaggattaagtaaaggactaatttaaattgggctccctactccaaccaattattcagattgtctcatttgatagcctcagggtgctgctgatactgaataatttgatccttgtctggaatcttttccttgacttcattattatacttgttcttatctacctcaggttgaaatatatgtgatggtcatggcaggtttcttgataaaagaatttggcttgttttttcaacccatcactagaaggtaccttttggagctatcaggtcatggggaaggctgttctggtaagacctgtccagacttagaaaaccatgacaattagcacccttagaagaggaaaatttggcttagaggcaggtaacagagactctctttagagaaagaaagggttattaaataatctagtgcaacacaatctaatagaagtacaaaataagccacatacataatttaatttatctaaaagccacatgaaacacagtttaaaaagcagatgaaataaatgtttatagtatatccaaagtatcatcatttcaacatgtaatcaacataacaaattattgttaagacacgttttaagttctttttctatacactatgatttaggatctggtgcatacttcatatgtacagcacacctcaattcagtctagccacatttcacttgtgctacagccacaagtggctgctagcatctactacattggttagagcctagtagaagcttattgtacttaatggacatctttagataaccttgtttattgagtccttcacagcattctctactcttatccacatcagttctaaagcttgacgccccttagatgagatagtggccacaactgtctgcctcaacaccaatgtactacttccttttctcttggcaatatccactagagaagcaagaaaaagtagcactcacctccccattcttctttgcagctaggggtggccatgtgacacaattgtggtcaatgagtggtcagcaaaattatgatcaagggtttctggtagctggtgcctccccttccttcttctgggtgttctgaatgtgaggcctggaactgtagaatcccgaataatctcaaagacacatgggctgacaccatgaaataattgaaccaacgctaacattcaccaacctccacatttctttctacaaaaatcactgggcacagtggcccacacctgtaatcccagcacttaagggaggcaagccaggagttcaagatgagcttgggcaacaaattgagaccctgttgctaaaataaataaataaataaataaataaagttagctgggcatggtggtgtgagcctatagagtaggctacttgggaggatcacctgagcccaggatttcaagcctgtgatagtgccactgcactccagcctgggtgacagagcaagaccttaactttaaaataataatacactgggcacggtggctcacaccagcactttgggaggctgaggaaggcagatcacttgaggtcaggagttcgagaccagcctggccaacatggtgaaaccctgtctctactaaaaacacacaaagtagccagtgtggtggcgtgcatctgcagtcccagctactcaggaggcagagacatgagaatcacttgaacctgggagacggaggctgcagtgagctgagatggtgccactacactccagcctgggtgacaaagccagactcatcttgaaaatagtaataatagtaataataataataatgaagaaaacaccataaaaaccttaattatttaagccattgttcgtggatttctctttgacttgcattttatttcacctctaagtgatgcaaaactttctggagcctgctctgaacagactacactcctcgtttgccctctggcttcctgctagctctgacaatggggcactacagggagacaagaaagtaggaggaaggagaaaagactcccattttccttttttgttccaatcagggttgtcctgaaatacctagggggatttctaattccttactggactctgactgatacatcccctgcggcctcttctctacatggaatttagaaagatagttttaggctaggcgcagtggctcacgcctgtaatcccaacacgttgggaggccgaggcaggtggatcacctgaggtcaggtgttcgagaccagcctagccaacaggtgaaaccccgtttttactaaaaatacaaaaattagccgagtatggtggcatgcgcctgtagtcctagctacttaggaggctgaggcagaactgcttgagcccaggaggcagaggttgcagtgagacgagactgcattactgcacttcagcctggatgacagagtgagactccatctcaaaaaaaaaaaaaaaaaaaaaaaaacaaaagatagttttaaagcataattcagttcatatatacagtggcttctgatatcaataaaaatgaaacccaaagtttcttctacagccagtgagatgttatttctttgatcctttctcctacctctgctctgacacaactgtcagaggcatttgaactagagtgactccatccggaacaggggctgggtaaaataaggatgaggactgctgggctgtatttccaggaagctaggcagtcttagtcacaggatgagacagtaggtcggtacaagatataggtcacaaaaccacctcctgataaagcaatgtggtaaagaagtgggccaaaacccaccaaaaccaacatggtgatgacagagacctgtgggcatcctcactgttcattagacactaattgtagtacattaaaatgctaaaagacactcccaccagtaccagttttaccagtacagtttacaaatgtcatggaaaggtccagaagttaccctatatggtctaaaaaggaaagcaaccctcagttttgggaactcctcaaccctttcctggaaatctcatgaataatccactcactgtttagcatatgattaaaaataaccataaaaatagccaaccaatattccttggggctgctctgcatatacagtagccattcttttatttcttcacttctctaataaacactcacttttctctgtggactcaccattaattttcttgcacaagatccaagaactctctcttggggtctgaattgggactcctttctggtaacacaatcacccagagttccttcctcttccaaatcaaaccaacccaacatactgtcaccctagggactctgcctgtaatagtccttccggatggatcctcactttgctccaaccctccgttggttcagccctctgctcaaataccacctcattagcaagggcttccctcaccacccctataaaacacagttccctgtccctctcaatccactcacctgctccttgtttttccctagtagtttccccacatgatgttttgaaactgccattgcaaaattataaccgagaaaattattacagtgaaagagagctgacctaaccaactttgtcttgcttctaaactcctagctgtcgttgttcactcatgggtgtaggccaaattaactttgggaggaacttagtttatagtttaactttgaaacaaagatgataacagccctttcccaaaacaatcccctttccttcctggggactagactgcttttgcaggactaacaaaattggccaaatgatgagaaattatggtttaggagtcatgcagttggaggttacaagattctgaccctccccaaattgctcctggggataacatcactattgtaaaacctaagatcagtgcttgagatattttgcaaaccctgcacttgatggatcaatatactggctcatctggtcttgtggccccacctaggaactgactcagcgcaagaggacagcttcaactccctattatttcatctctgacccaagcaatcagcactctcaactcactggctcctacctaccaaattatccttaaaaactccaatccccaacgaatttttggggagactgatttgagtaataataaaactcccacacagccagctctgcatgaatgactctttctcttttgcaattcccctgccttgataaattggctctgtctaggcagcgggcaaggtgaacccactggtcagttacagttttacatgcttgtttacccatatattattcatctctcccaactagaataaaactccaaaagggtaggaactttgactattgcattcattgccttatccccattgcctggaacagtttctgagacaggactcatgggaaaaggatcagtaggaaatggaaagagatggtatcagtttcaagtatgatgattttcgagttgccccttgaatattcctgtggacatacccagttgacagagacacttgagtctggagctaatggaagacatatagttagttgaattagatttgattaaagctataggtttagatgagaacatccaggaatggttcatagaaagagaggagagtcatgataaaattgcacaagacataatatcaaagagagagattgatacaatgatagaggtaggaggcagagaaattccaggcagacagggacgggtccctgacaaaactccaccttcaagccgaaaagcctgaaacccatggcccaaagtgagaacttctatccattttcctgcttaaatgttgccttttcctaaactacccatgacccaccccaccccccatcctgtgcctataaagaccccagactcagtcagagagaagtgacttgacttcagagggatggcttgatggcttgacttcagagaagactggccagagatggctggacttaaggggaagattacttgcccatcccatcccctttccaggtccccttcccctgagagccattttcactgttcaataaaatcctctgcattcaccatcattcaactcgttcacacaacctcatttttcctggaagccagacaagaccttgagagctatgagtgcagacaaccaaaaaagggctgtcacactggccctttgccgttggtggtggagggcagccgcctcatgtgatgaggcaaagggcccactgaactgttaacacttaagccgaacgtggctggcagagctgaaatagcactgtaacatgtcctcttgggcttcaggggtcttaggtagccccacttggatgctgccatggggcctgcatagagtttgctcctgctggcacccaaaagcagctggccagatcccgtatttgcttgcctacttgcttcctcccacaaggggttgagtgtggcaagctgagtaaatggagtttatttctgccagcactcaaaagtgctccctctggttcctgcacttgttcactcatattttgcctcctgtgagaggtagaaaggggtgggctgagtaaacaacgcacccctgtcttgaattccacaaaggagtcaagaaaatatcctgcttcaataccaggggggctatgcagcgatgttatgaatgaccatcagattagagagaagtggtgctgcagaagtcccgagaggagaaattgtccaggggaaggtgactcaatgccacagagaagacaggtgagatcaggactaaacttgcccttttggtttggtaagcagggaatgtaagccaaaaataaaattctaagcccttccagctgagtgacggacccctccctgccccccatctctgccaagggcattccaaagaattatgaaaaactagtacaggccgtgatgggaaggaagggtctgacacgcctcattataccctcctccctttggaattcaggtatgactaaccagcactaaccttaaaacagcaatcttaggactgacaaaataaactccttgtagcaataagataccaacatgacagataacaggccctgaaagaaatcaaagtattttacctgaaaacatatttctttgacatattttgaaatggcccggcaaaactgtatcttaggggaaaatctacattctgtagagaatcactttccttttccaggtcttttccctcatccaggagataattaactaagagtctggcacctttttaagtgtgataagaaacatttacagtctattctctgaaacctgctacctggaggcttcacctgcataataagaaccttggcctccacatccccttgtcttaacccggacactcccttctgattccaggtctttacataccacctttactctttcaaacaattgtcaatcaaaaatctttgaattcacctatgaccggaagcctccctcttcacccctctacccctgcaacatacaccttacatgtattgactgatgtcttacgtctccctaaaatgtatgaagccaagctgcagactgactccctcgggcacgtattcttaggacctggggccgtggtcactcatgtttggctcagaataaatctcttcaaatattttaacagagtttgactcttttcctcgacaggaagctttgtcaatgctggtgagggccattgtgtaatgatgaattgagagttttgtggaaagccagattaccatggattgaagagtaaacgagatgggagagtgtgggtttatcttttgtaaagagtgtctgaaaggaggaaagacatttcctaactacaagacagattaggtcaaaagcaaattgtcttttttttggtttgtttttttaagaggaaagatagttggatgttccacacagcactggaaatgagtgactgttgctgaggacacaggccaaggccgacttggaaggcctctgtactctatgtgggcaccatttccagactcgctgttgtgcaaatctgggttcatagaggtgccttgctgagtctctggtactgtcttttcagtaagtcctcttttgagacatgaattgaaagcaccatagaaacaatggaccctcccactctgctctgaagcaggcctagcccctgactccctacgttgctgggtggaagccagtcctctctccaattttgcagatttgctatctaaagaatttgcaggccaggcgcagtggctcacgcctgtaatcccagcactttgggaggctgagggaggtggatcatgaggtctggaaatcgagaccatcctggccaacacggtgaaaccctgtctctactaaaaatacaaaaaattagccaggtatggtggcaggtgcctgtagtccaagctactcgggaggctgaggcaggagaatggcatgaacccgggaggcggagcttgcagtgagccgagatagtaccactgcacttcagcctgggtgacagagcgagactccgtctcaaaaaaaaaaaaaaaaaaaaaaaaaagaatttgcaaaaccttacacgttcctctttttatgtgtttcctgcaagctgcaggtcacatattggaagaagatccttggaacagagggattggtatagccctgagcttcccaaggtaaacacacaagccaagtcctagcagcaccaggttagggtaaataaaaaatttgaaaggagcaaacttgcttttgttttaaaatatcatagtttaatgagaaatttgagccttggtgactgtcttaacccttttttttgtgaatattgacgataggccttgatccatagtatgccacgggtacatgatcctttcacaaatctatggtggtgaaaaatgtctctttataatgtgttgtgtactggtaatctgaggctggaagagttgtggatgtggtaaaaatcagtctttgtggttggcccacattttttttctttggcctctggcaactgcaccctgtgtgtgtgggcataagaacagtatggatccatcaccttactggcttgtcagcaattacataagacagctccactttcactgagagtaacaataataatttcttctgaggacttttctggaaatgaaaacactttaagcaaaaagcagtgatctaatttggaagcaatacctagcagaaagtgtattcgtttcctagggctgccgtaaaaaaaaaagaccacaaactgtgtggcttcacacaacagaaatgtattctttcccagttacagaggccagaagtccaaaatcaaggtgttgacaaggttggttcattctggaggctctgagggagaatctcttccatgcctctctcccagctcctggtgagtgccagcagttcttggtgctccttggcttgctgatgcctgactccaaatctctatctccatcatgtggcattctgtctggatgtctctgtgtccctgtcttcacagggccttcacatgacaccagtcattggaactagtgtgcattccaatccagtacgacctcatcttaacttggttacatctgcaaagaccctgttttcaaataaattcacatgtacttgaactgggggttagggcttcaacatatctttctgcgggaacacaactcaatcaagaacaggaggctattgagaaataggtatttagaagagctcagtaagaatccacatttagcatacaaggaaggaacatggtatgctgagtagtgaattataacttttatgtattcaagctttggtaaaagctggaatccctctggggaaattaagaaaaaaaatcccactttgatagaggctgaaattcttggtagtggaaagcagatgagcccactctgtctagcacatatagcagtttccctctctttaaattggataagtctggcctggaaactagaaatctcggttgacagccataaaccacttagaagtagtcagaattacagtcatttgcaatataccataccctataagaagagcatctccttaatcataatatccaactctcagactatccttttatagacattgaggctacaaaggcattttcttgatggattccatggtcccgggaacttctcagaatctgcatggcttattctgggaaatttgccagacctcagccttttaaatttgtgtaacttacatgatgaatagtgtattgtgtaggaaagcctatcaaaataaaccaaatatttcttctttccttatgattagaaaacctgtagtttgtctctccgagttaggcattacattatgtttcctctgggttcatttcattttataatttaaaaaaactatagtgtattattgtctatctgtgccattattttccttgagtttaaagatgtcacatcaaacagaactcttttttgaactgaatctctattactggggacctgcacgttttgaagctggctaggactaaacattttcttcataccagctgtcacaaataattcagtctgctaaattctaatacactggcagaatgggtgagcagtcccttgaaaagagaattttaaatatcagtctcttctctcttatatcagtgttcagaaattccagtgaaaacatttggggaagcagacagaattagtaataatggaattagagtgctttccacatgcccattttgtgttgatctgcatttaggtggaggttagaactcagtccctaagtcttgaaagtttgatggcatgcagagcaatgtactgagactatgggtcccagtcctcaggaatcttattgcctcacccctcaagaagaaaccaatggtactagtaacgacaaaatgctggagactgtattagtttctttttgctgctgtaacaacacaaaattattatcttatagttctgggggtgagaaatctgatgtgatctcggctaaaaattaaggtattggtatgactggattcattctggagtgctctataggattatatgtttgctttactcttccagcttctagaggcgtcacattacttgactcatggacccctctcaactttacaaccagcaatggttggccaagtctttctcatgttgcgtcactctgacagtgacttatgcctccctcttccacatttaaggacccttgtgattacatgggccacccaagtaatccaggatgatggatccagccaattggcagttttaattccatctgtaatcttaattctcacttgctacatagcctaacatagtcacaggttctggggattacgatgtggacatcttgggaggttgttcttccatctaccacagaagagagtaaatatatcccagaggtcagtcacgtgtcctcttctgatcagaaaggtaggaggcttagttctgaactgtgctgctctgtaagtgtattttactgagtcattctggcactgggtgcagtgagagacaatgcaaattgcaaaccgtatccaatttctgcctcattactgttaccaaaatgccaggggcctgctgctcaccacacagaaagctgatcactgagacaatgagtattatcagggaagaaggctttcattgcgtactgctgccaaggagatgggatgcaagtctcaaattgggggttcatatagcagggaagtaatgtagccacatatattgtgttagtttactctcacattgctataaagaactacccagccagacatggtggctcacacctgtaatcccagcactttgggacgtcaaggcaggtggatcatttgaggtcaggagtttgagttagcctggccaacatggtgaaactccatctctattaaaaatacaaaaatcaacctggtgtggtggtgggcacctgtagtcagtcccaactacttaggcaactgaggcagaagaattgcttgaacccaggagatggaggttgcagtcagccgagatcatgccactgcactccaggctgggcaacagactgagactctgtctcaaaaataaataagtaaataaataaaataagaactacctgagactgggtaatttataaagaaaagagactcaattggctcacaattccacaggctgtacaggaagcatgttggggaagccccaggaaacttacaatcatggcagaagggtcaaggggaagcaagcacgtcttcacatggcatcaggagagaaagggcaaagggggagctcctacgcactttcaaataaccagatctcatgagaactctatcatgagaacagcaagggggaagtccacccccatgatgcaatcatctcccaccagctcccttccccaacattgggaattacaattcaacatgagatttgggtggggacacagagccaaaccataacatacaggaaatcaggaattagggggatgtaaggaagaggagttgtctaaatgcagtgatctggtgagtttcagtttcttgatactatctgggacgtctggtggtcagtttcctgggaaagatactcaaattagacaaatgtaagtttcaagttttaagaccaggagagtcagtttctatgtttactcaaaaagatcacaaacatcagttctacaaggaaattagccagtttcattatttcctccattaccccctaaacctgagcatgaaattgtcatcttttccagtagctgggaaaagctaaagatcttgattttaaatggcaaatctaaagatcttaagaagggcatcaagcagatgcccttcccactcttccatcaaggaaaagtgtctgcttccttgttcatagatgatgccttcttgttgtgtgctcacatggtagaagggcaaggggcctctctcaggccccttttataagggcactaatcccattcctgagggctccacccctctgacctaatcacttcccaaataacttcccaccttgtaataccgtcaccttagtggttagaatttcaacatatgaatttgtaggagacacgaacattcacagcatagtagatacgcaccacatcgatgcaagatattaacagcaggggaaatgcatgcagaaggacaggggatataggaacttgctgtattttcagctcaatatctctataaacctaaaacagctctaaaatataaactctatttaaaaaacaaaaatgctgtctagccagtgtcttttagggtccagatgtgggggccatttacattttggactgcgtagcataaaggaaaattatgtaaagcatgaactgtgtaagctctgacaacatgtccttgtgggcaggagcagactgcaatttctgaggcatataaaacacggggtcctctgcaggaaaagaataaatacaaaatgaagtaggaaataaaatacttatttggaagaggctttgcaagtgagggatcctgacacttaagtttcattaactttatgacatctatcttggcttgtgcgtgctgacacagagaaagtaggggttctgagggaggacagaatgccataaacacagagagagaggcaaagccgagagacccagagaaagggagagaaatcatttgagggccttcctttctacttttttgttgcaggttttattttcttgtgaagccgaaatttgctacccatgagtattaccaacaacgtgcccctgttagcttaaactaatgtgttggaaccaaatacccagcagacgcaatatcccttatgaggaggggaggggcagttggaagtggttccattttgtaagtggcaccactgaggcagaaagccaagcagtaacctgctcaagaaaggcagtatagtatggatggttcaaacagagcctacttctttgattttcagtccaatggtctcttcattgtctttggaggggagttaacacctcctgagaaagccagtgcattacgatctcattacttattctctgcccacatgactggttctgaggttccttgaaattcaattctgtctccgttggagactgagaaataatgaactgaggataaaccagggtaggtgtcatcacaagatgacatttttgacagtatgtccagaggccgctgttcattacagttgcttgttgagacctcctcctgccttccactggagtgatgtgcagtgagggtatttctgtaacttttcctccaggaagtttcctttccactttgatgtaacagaggaaacagacagtcttaatttaagctgaattcaactgtaggctccttaagccctagagttaggatacaactggacaatgtggcaaaagacataacacataccgcagatttgttagaaagaatgcatgcggcaagcgttggccaattattccggtgtcacctggggtggcatgttattttatgctgtggcgctattgctagtgatggccgctgtgtatttgctctccaaatccatggagatagttcaatgcctttttactgtgtacacttggcagctgctaactgcagacataagaacagaatctctgagggtagatggagaagcaagttatgtgaccatttttctgtgttctcaatgccctcactatacgtaaaagtaaagaatacaatttcacactctctctctttttaagcaattataagatgtccaggtcagtgctgagagatttccaaacactagcacaaaaagttcctgaaagtggtcttggataggaggaatgattactctctccactgaggcaggtggagaagtggcagacacagaattcaaacctaggtctccccgactgcagtgatctgttgcccacccactgttcaaccttccattatagtactcaccgaatgccttcccagatggggtcctcaagtccctgcaccatgtgtcatctttgtatctataatatctagctcagttcttcttactttctgacacagcgcctcactctgttgctcaggctggagtgcagtgacaccacataactcactgcagtcttgatttctcgggttcaagctatcctcccctgtcagcctcccaagtagctggaatgacaggtgtgagccaccatgtctagcctcaacgcttcttaaaggaagtgagtgaatgaatgagttgtagccccagctttgatcgagttgctcagaatgtcataaaaaaggtggccatgtggatgttttggtgtcctttttccagggggatttcttcctgtgctggaggttctctcttgaaagttaatgggtctcagcacagtgcctgaagtgatttgtgggttggatcctcttaggcaagagcccatctgtgggaatcaatgtttggcttatccagtagacaaattagtctgacatcactatccctttgagggacaggctgttgtctccttgtcaagagtggatcatttgctgtttagttttccttcggtacagaagggcttgggtttgggggtgagtgattcagcacttggttaatcagctattctgcatggcatcaatgtttttgaatttttgaaataagtcttgtggattcctctccactcctcttctgtttagcaccacctacaccttggtaactctgtctgctgacactcgttctccttcagtttctcccccacattccctttctgctgcctgatgaatctctggggaaaaactacctctcaaggttttcctgtcaaatgttccctggtaatgagaacagagctgagtttttgggtcgttgctatggagaaagtgtgttttctcattgccctattatatttgagtatgttcccagtctgaaatctgtgggtgacactgcatttgcaccccctttttaggtctattgtatctcaattatataagcctcagtgtgcttttttttgttttatttttaacagtttttatgttccccttttaccacccagtataacaggtggcctcacgtcagtggttgaggttgaagaccatgaacctaatatctctcctgcattatattgcatgcattctgctgctcttcatgcagaaagaaaacattcaatttttagattcatgtgaacactacagaaataactaatatgtgatgaacactggctccttccatacttctcacatctattggctattcctgtgcttctaactagtttttatttaacaacattgaatgcttaggcactgatagattctagagctttacctttctttcttcctttttttttttttttttatagctgaaacctttcttctatggaaatggtatgaaaacccgacagggaaaacaaataaccgaggtgagagaaaggggctcagagctcaccactgctcttgttccttgcaggggtccgtcaggttcatccacagaacatcttgggctggcagagttcagatggaaacccactctacaagttgccacaaaaatgaacagactacacggattttgggagcttacagctgaacggggaaaatgttatgtgatcaacacgcaactcatagtcaaacaatgtcctaattgctttaagagcagtaaggtagaccctgagtgtcagacagtatggtagataggacagtgggcattggagatctggtcagaatcctgattcttcaactctctctgagcaaatcaacttgaacaacttgaacttctttgaatctgtttctgacttgtaaaatgaagataatgtgacctacttaactttttccagatttgttgacaggatcaggcatacgattgagtgcaaagtacttaatccagtgtctggcttattgtcaaagagagtattgataaagacattcctcacaagaataatagctaccaccattgattgctttctatgtagtagtcacagcactagacagaactaggagtcttgcctcagtcatctcagtgtcttctctaagcctcttcatgagaaatcttacaaatcaggtcattaaaatacaggcttaatatcttattcatgtatttattcattcatacaacaaatatttactgagcagctcttaaatgctaggcactggtctagtcttgggggacactacagagatctctgccctcatagattagatgttgctttttttttttttttttttttttgagattcagccaggctggaatgcagtggcgtgatctcggttcactgcaacctgcacctcctgggttcaaacaattctcctgcctcagcctcccgagtagaagagattacagacacccaccagcaaacgcctggctaatatttatatttttagtagaggaaggggtttcaccatgttggccaggctggtctcgaactcctgacctcaggtgatccgcctgcatcggcctcccaacatgttgggattacaggcatgagtcaccgtgtctggccagatattgcattttaatggagtaaacagactataaaacagttgtattacttggatggtggttcaaacagaaggaaatctctgagatgaccctcaggttttaatcttgatgtttttacctgataatcaagatctggctttgctcaaggaatctactccatatttaccctctgagttctgagatgattcttttctcctggagttcataatcatgtcacaaatgccacatttatcaatacatgtgatttaaggtcccatatcatctctttgaaaaaaacttgcttggagattctgtgcttgttcatgcttcccaattcagtccatgcatccaatccaattttaaatgtcttctcttctgggaaactgtcctaagtcctttaggtctcccctgatcctagtacagacttatgtctgtcatagcagtaagccttcaatatcccaattcgttgtttatgtatctccctccttactgttctctgtgtttcttgaaggcaaggaccgtcttttatttattccctttgtatccccagaatctagcacatatagcactccatttttttaagctgatgatgaagaaaaagaccaataaaagatctgtagaaatactatatgcgtatttacacaaatgtctatacttagggggaaagtacagctgaatctttcaatatgttttaccacctgctctgtagatgctgtagattggtggctataacttgtgggtctctgtggttggtgaaggtggtggtcaacttggtatttctaaacaggtctttgtttgcatttatctatctgcatttgcttaccgcgagctatgatatttagaaatgtgcttctaatactgttatctcaaagttcttgctctggaatgtaagcatcttgatttagatacagagaatgataggcaatgaaacctgcctgaaacgaattagctaattggtttcagttctcctaaagaatgaattttcatctctgtcctgtcttctttcttcagatcagttcaggacctttctgatgtgatttatcataacagaactgtaatttacatcaaccatctgaatgtccctatgtaagtggatcggggattacttttacttgcttcttgcgtgactcaattttggagaacactcaactgtttactgtcagaatctgttctcgaatgagacagatgtaatatgaaaagttaacagtggcctgtgtctctatgatgtttgctccctcaatctgttatgcattgttttctcaaaagtcattttctaactcccgtgaatgtgattcattgatgatctctgcttcagactataaagagggcttagaaagaagtaaacactcaagagtttaactggcttagtgtttggagttgcccttactgggctcaaaggatgccacttgcctgtaataaccagccaccccaagtcagagccagatggaggtgtgggactacaggcagaatattaagtttggcacctttccaaacaaaagttctttaaatattttccagcataggtaaagaggagaggctaagagctgtgttggagcaggaaaaggaaggaggacatgggggttgtgctcagtttctttgctattgctccaagaaactcagctttggccccagcttttgtaacccacatagctaaacaaactgagcaggttaccacatcttcttcttgggccttgtctcatctctcaccctagcagcagcttctcaaagtattcttccccatcacatggagtatcttctgagatgtgcacaaagtacccctttctccatctagtccatgtctagtgaagttttttttttctaatcatgtattagtgtctcttacagactgaaacctgggacagaggcctcatgccccttgtcagtcttgctccagataaaaatctcatttatgtgacacactttatcctttaattcttcaagcctgtactttgcacatcaagcttctacaagagtagttggtgcttttgtcctgaagtcaaattctatgctttgttctcaagtgggtcatggaccccatcactaaagcacagaagagaaaccgctgcctcctttcggcctatctatattccgctgggctataggcctcacatcttcaccatgcagtatagtcctcatgaccttacagccacacaccctagccccactgctctgaaatccttggaccagccatatgtgccatgcaacattaccttgcctgcactctggcttgtcaccttttcaaacagcagaggagcctttgcttaccccacctgtggggctggtttttcctgtagctgagcaggaccttcatagccagttagtatctgcttctcagatggggaaggtttactaaaagcactcaacagaggccactttcctgacagctgactgcatcccccatgggctaaaccatctaaatctccttcggcaccaacccatttgctttacacctttaagatctcatactatgctcaatttctcaccatcatgcctgagactccgaagattaattccaccaagtctatgttaactgtcctctagtttttctgatgctctgtttgtttccttcacagaacttcacatgttgtaattattttcctgttcctttgcctgttaatttctttgccccttgatacagtttggctcttgtgtccccatccaaatctcatctcaaattgtaatccccacatgtccagggagggacttggtaagaggtgattggatcataggagtggtttcccccatgctgttctcctgatagtgagtgagttttcataagatctgatggcttaaaagtggcacttcccccttccctctctctctctctcctgctgccatgtaagacatgccttgcttccctttcatcttccaccatgattgtaagtttcctgaggcttccccagccatgcagaactgtgagtcaattaaacctcttttccttataaattacccggtcttgggtagtttattatagcagtgtggaaatggactaatacagaaaattgataccaggatagtggagtactgctataaagataacctggaagtgtgaaagtgactttgcaactgggtaacaggcagaagttgaaacagtttggtgagcttggaagaagacaggaaaatgtgggaaagttttaaatttcctggagacttgttaattggctttgaccaaaatgcagatagtgatatatggacgatgaagtccaggctgaagtggtcctagatggagatgaagaacttattgggaactggagtaaaggtgactcttgctatgctttagcaaagagactggtggcattttgcccctgccctagagatctgtggaactttgaacttgagatgatttagcgtacctggtggaagaaatttctaagcagcaaagcattcaagaggcgatctggctttttctaaaagcatacagtcagtcgtatgcattcacaaatagatggtttgaaattggaagttaggtttaaaagggaagcagagcatacaggtttggaaaatttgcagcctgaccatgaggttgaaaagaaaaacccattttctggggaaggattcaagtccaagccagctgcagaaatttgccaatcaccaagacaatggggaaaatatctctgaggaatttcagagatcttcagagcagcccctcctattacaggcccagaggcctaggagggaaaaatggtttaatgggccaggtgcagggtcccgctgctctgtgcagccttgggactaggtgccctgcatcccagctgctccagttccagctatagctaaaaggggccaaggtacagctcaggcagtggcttaagaggatgcaagcttccagccttggcaacttccacgtggtgctgggcctgcaggtgcagagaagacaagagttgagctttggaaacctccacttagatttcagaggatatatggaaatgcctggatatttaggcagaactctgttgcaggggaagagtcctcatggagaacttctactagggcaatgcagagggaaaatgtggggttggagcccccacatagagtccccactggggcactgcctagtggagccgtgagaagaggaccaccgtcctccagaccccagaatggtaaatccactgacagcttgcactgtgcacctggaaaagccacaggcactcaatgccagcctgtgaaagcagctgtgggggtggaaccctgcaaagccacaggggtggagctgcccaaggccatgggagcccacctcttgcatcagcatgccctgaatgtgcgacatggagtcaaagaatattactttggaactttaagatttaatgagtgccctgtcaggttttggacttgcatggggcctgtggcccctttgattttggcaatttctcccatttggaatgggaacatctgcacaatgcctgtacccccattgtgtcttggaaataactaacttgtttttgattttataggcttatgagtagaaaggacttgccttgtctcagatgagagtttggacctagacagttgagttaatgctggagtgagttacgactttggaggactgttgggaaggcatgattcattttgaaatgtgaaaagaacatgagatttgggaagggccagaggcggaataataaagtttggctctgtatccccacccaaatctcatctctaattgtaatccccaagtgtcaagggaaggacctggtgggagatgattggatcatggaggtggttcccccatgctgttctcatcatagtgagtgagttgagatctgatggttttaaaagtggcagtttcccctgcaccgtctctctctcctgccaccatgtaagacatgccttgcttccccttcaccttctgccatgattgtaagttttctgaggcgcctccccagccatgcagcactgtgagtcaattaagcctcttccctttataaattacccagtctcgcgcagttcattacagccgggtgaaaataaactaatacatccctggtaaactctaagcttatcaaaagctgacaatgtctaatggttcactatgatacccttgagcaactagcgtagtgcctgcactcattggccttcaattattgttgaattaatgaatgaattttgcaccctcattttagatggaatgggatgctctaggagaatttgttcttgatttcatggccatatgtagaaagccttgttctagaggcagatggacatacataataattaaacaagccaatgtttacatttgtgtaaaatgcctattatcttgtagttgaatcatttccaatttttcctagtataattttctaatgtgctaaatttagtatttgtaaatgaagttttgagttgccttaatattctctcttcttcttttcttaaataattcatgacctgaagtaccctaaccttttattttctctacttgttctttcctactgtaattttttaaaatctcaggcaacctgagaggcagctgaattcttttgtcatgttgtatcatgtcagcattaccacacaagtttctccagaggctgtcttgtaattacacttgattggctgattattcctgaaaggcaaaataaattttacagctgtctaggtaaactttaaaaacatcctccaaaatgtgatatgtgtgaggcctgccttgggatcatgactttcgatggaactaaaccaatggtcaatgacccatcatggtataggcaagttcaccatcatcaagaaatcagtcttttttgtcctgtgccttcaatctgatatttctctctactagagagcaagaacatctagtcccaaagcctatagagaatgttagtggttgcctagcaacatcatttccagcacaagtttgtggctttctaagcaagggaagggggtaaccttcctgtctttctcagctccctgtgagtctcttgtatttttttctactatgttgacctctggctgattgaaaacatataagatgatgtgtggaaaaactctttcagatagttaagtgtgaatacaagatgggattatcacctctcatgaaagcccattctagtccccgattctttagcgcagtgtctttgcagtcagaatatgaatcgctcgttgccaatttttggtatattctgatgcgagcagaactgcaaatgttggccccgacaagcaaattaaccacctcctaaattattttgttttttcttctggagataagtggcctgttttgtggtctgttctgttggtcccctgtctctcattccccaagcactgcaaggttgatttttaagaatatgtattggtgattgctgctatttccaagtgagtttgatttacctactttgtttattttaggtatcatgcactttctatttgttgagcctccttaactatttctccttatgtttcacgtcttcaaaacttttgtgtcatgcatctgccaagccaaaatcaggagttcaataaagtcacttgagaattataaaaacatttagttgttgggagataaatctctataggtctcaaacatttctgcatgtcttgtgaacagagctgcctttgttctgggatatcttttcaaggatgcttgcacagccaacagtcttggaagatagagatactgtctccctccagagcaaagggaagatttgcttagcctggaaagataatgatagtatgtccttctggagcaaagaaggaacttagctcatggttcattataaaatatgtaggttccctgcacttgagtccctctcctttagcacacttaatttcttaggtctctctttatatttcaccatgggaattggggcttggagaactggtgcaaatgctaatactctattgctgaagctgtcagtaataaagacttttgcctctgactcaggagtctcgtgtcttctgcctgcatctgtgaaattgtggccagacaacttattgtcttgaaagtatggtaaaatatcagacccttcatagttctagtcaagttcttagtagcttaatgctcactagttcagtaaatatatgtgttggaacatatttaaaattggtcttaagatacatttcttttaaggaacattttagaaattttagagacctgaaattctacatgactttctaccaagagaggatcaacttttgggttgaaagaactgaaaatgcaatgatgatcattgcattttactaatcaaaacttattttcaatcttcattttcaataaaattaagttaaaatttcttagctggcataacaaagatagtatggatttggcttaccttacctttctacatatgcccaaagctccggaaaactcaaatgttggaagtaactgatctatatttcactagacttttgttttctggtatttctctcagtgggtggtactgtaatttagcagccatccaaaataaaacctgaaagcccattactcttccctgttcttcattaatccacatccaatcattagtgtgttaaagatctctgttttcaaatattgcatgtgcagagactaaaaagtgcactgtataaaatagagagtatattggtagttaccagaagccgggaaaggtagggggaagggggagatgaagattgattgattcatgggtacaaatatacaattagatagaagaaataacacctggtatttgatagatcagtggggtgactacggttaacgttaatcaattgtacatttcaaattagcaagaagagagtaattcaaatgttcttagcattaaaaaatgataaatattcaaagtgatggatatctcaattaccttgatttgattatatgaatgtatcaaattatcacatgtaccctgaagatatttacatttattatgtgttaataaaacaactctagtcttttaaatatgtcccctattttccacgcttagtatcagaactctctactttttgcttgtttgaatcattgcattagctttctaactggcttctttaattcctatttgtatatttaaaatctgtcttcccaactgggctcagaccagtgtgatacatccaaaatacaaaactgatgctgtttaaagtgtgctagcagcccccctttttacacagaataaagtccatgcatttcaggatggcctccatgaactggcccatctatatctctttggcctcatgtttattttatgatctgtgggatacgtatggctagtgaccgagagcaagggctctggagtcaaagcatctgtttatattatggttttttcatctatgagctgagtgaccccaggaagatttaaatagtattccatggcttagtttcctcatatgtcaggtgggaatacaaagagcagctactcatagggttgttggaagaatttaaaaaataatttgtataaaaacacacattggtccattttgtgctgctatcatagaatactacagactgaataatttttaaacagtttaagtttatttggctcacggttctggaggctgggaaggccaagactgagggtctgcatctggtgagaaccttcttgctgcatcataacatggtagaaggcatcacatggtgagagaatgcaagaataagaaaaagtgaagggtgctgaactcaccttttataaagacaccactcccttgataatgaacccactcctgcaatgacaacattaatccattcatgaggatggaaccctcatgacctaaacacctctcattaggttctgcctcccaacactgctgcattggagattacgttttcaacacatgaactttggggaacacattcagaccatagaataacatttagtgaagtgtcaggcacataacagatattctacaatgtcagttatattaatattaaactgcttgttttcatcatgtgccatgtttttctattctttgtcttgctgtcttttgttttcctttgtgtaaaatgttcttgctctgcttcactatggaacagtggttgacagcatgggctttgggtgagattaaaacaggtttggattcagacacttccatggattaactgtgcaacattacaaagagtgctcaagaagtgattattattatcctatgtacccttcaggattcagctcaggggaaatcatctctgtgccagttatgaggctattaccttttggcatcaaatctatccttccatagttggcattttgatgctggggccaggattctgcaacctgcatttttactttgcctgcaggctccgtgttaggctccctctacttgggaaggaagacagaagcagcagggctgagggaggaagaagggacttccacctcctgtttgtgtcctgtgtgcctcctgcctgctgcctgttcctactaggctgttagttcttgttttatcttttcaaaagacagagatgagggtgaggtcaatgaagcatctgcctcaggaacaaaatttaagggaacactaatactaaggaatcaggataaattactgtatattcaaatataatattttaaaaaatcaaaattaaatgaaaaaaaacccataatgaacaaaatatcaaaattttagtagagaccagtgcccgctgagccacattagagcctggggccactggttttaataaaaacaaactcatcaataatatattcaaaatctactttgttgctaatttcatttttagttgagagaattactgtgtttgacaatttctcttgtccaagagatgatctttaataatttttacttagcttaagctgatacagagtgataacaaattagcttttggcataagtaaaatattaaacttaaaataacactgtgggctgggagtagtgggagtagtggcttatgcctgtaatcctagctctttgggaggctgaggcgggtagatcacttgagcccaggggttgaggccaggctgggcaacatagccaaaccttgtctgtacaaaaaaataccaaattagctgggtgtggtggcacatgtctgtagtcccagcgactcaggatgctgaggtgggagaattgcttgagctcaggaggcagaggtggttgtgagctgaaattgtgtcacagcactccagcccgggcaacagagcaagacttcatctcagaaaaatggaaaataaaaataacattgtgaattttaatacacctacttttcggactttcaatatttttcttttttctttttcttttttttgagatggagcctcccttcattgcccaggttggagtgcagtggcatgatctcagctttgtaacctctgcctcctgggttcgagcaattcttccaccgcagcctcctgagtagctgagactaccagtgcacgccaccacgcctggctcatttttgtatttttagtggagaccacactgtgttttaccacactggccaggctggtctcgaactcctgacctcaagcgatctgcctgcctcggcctcccaaagtgctgggattacaggtgtgagtcactgtgcccggccagtatttttcaattactttaatgttctggaaaaaaattatcttaaaaaatatacaaaattcccagccaggtgtggtggctcacgcctgtaatcccagcattttgggaggctgaggtgggcggatcacaaggtcaggagatcgagaccattatggctaacatggtgaaaccccgtctccactataaatacaaaaattagccaggcatggtggcgcgcgcctgtagtcccagctactcaggaggctgaggcagaaaaatggcgtgaaccttggaggcggaggttgcagtgagcaaagattgtgccactgcacttccagcatgggcaacagagcgagactctgtctcaaaaaaaaaaaaatatatatatatacatacacacacacacacacacacacacacacacaattatgtatctttctttgcctcagctccctgtggttcaccacagcactgccttttcacttatctagttctcaagtttatatgtaggtaactattctttgatgcccttataagttacacgaccctgagtggtcagcatcccccaacttcttagagggacaagtggcgtgcagccacccgagattgagcaataacaggtctcttctttttatgtggctcttccacctacacgtgcctacctgccaactaaacttgcacatgtactgtagtcttccttatccccaaaatgcagcttgcagatggaacgaacaactgccagtccccctcatgacaccaacacgacaaaaaagagtcatcccactaatccctttacttgtggatttaggactttctgcctccactattgcacttggaactggaatagcaggcatctcaacctctgtcacaacagtctgcagcttctctaatgactcctctgctagcattacagatatatcacaaacttaccccaaaatcttacttcagtctaatctctcccacttcaggttcctgtgccacccctaatcctgctcaaagcagccctgagaaacgtcgcccatcacccctccatactgcccccaaaatttttaccccaagttttcattactctttctcgttttatttcttcattattaacataaaaaggaacgtaaggtcctctgagctggccacaccatggtaaagccaaggcattccccgccccaccctccccccatgataatgtactttgtgatattccccctccttgtgaatgtactttgtaacattcctccctgctattttgacaatacatcctccccgcccttgtgaaggtactttgtaacgtcctccctgcccttgagaatgtacttgtaacatccatcccctgcccgcaaaaattgctcctgactccaccgcctatcccaaacctgtaagaaccaatgataatcccacccttctctgactcctttctcggactcagccctgcacccaagtgaataaacagccctgttgctcacactaagcctgctcaggtggtctcttatacggacacacgtaacaatattaagttctctctgtgatttctacctcctgaacagattctgacaacctcaaagtgcagagtggatttcttcctgttctctttccctctcttgggcacttccccacatttatactttgctaattttctgtattccaagaaatatagtcctccctgccctgcacaggcattcatttgttcctgtgcaaattcaatccattcttcaagatccatctcatatgtcatgaaatcattctttaccctgcaccaaatgaaatgtttccttatttcatgggaccatagagctgtactggcatccataccatcttactgtaccttgttttgttgctatttgtgcatatatcctattccgccccgtcctcccatctgagttgtaactttgaagatcagggactgatcttctggtctttctcatctttgaacatttcctatttggtgaggtcaggagctttggagcactagtcacagagagaactggagaaacagctgggtcatgaaacaccgggcttctgcacattggtgggaagcaacaccagtaggtgttgaagttagttttctttacattcccagtgatctcaaagcttgcttccttttttgccatttctgccttgatgctcagttttggtcctgaaaggaacgattaacttttcttctttccttagcctgctgagcacagggtggcatttaaaacagttgagagcgctctctcccctgaattagaaagagagtgatttccaggaagcagaagttcccttgggatgtttgccagtgggagtcaaacagccctgtgtgaatggctttgtgagccaagaccttctcttcacagaagtgatgtgatgctggcaggaccctttaatgaagggaccatggtaattgagatcagtggggatattctgcttacttctatagcaatcaaaacacctcctacaaaatcaaaacattaggaacagcccatcctcagcctcccactggccccaactttgttcttttagaaaagtcaaagcccactgagactggggggtaactttgtcagaagtttgtttatttatatagtttaaagacgattattttcaaagtggaagccaactgatttcagactacaaaaagaattttccaaaaacaaagctacgaggtcaagtttcagcttcatagaagggataatttgggcaaacttcgccaaccacaatagaatatgacatattaaattactgctctggaaaaggcatttgcgtttgtagacctcaggaaaccctgaatcttgagtgcagtctgagctgagagctttccctgagaagcttgcatctttataatactgactgctgacccactttaaggtctttgtccccaaaccacagagagaagaaaacaagataatgcaggtcctactagagactcttgtaccttggtgtatttatgcacccactggtgggcattgcatttccaaactagggccatggttgatttcatgctcaacctcatggcattatttactatagaatagaggatgaaaaccccaaagtatcacactagattcctggtcctttcagtatcttttcaaaagcttggtggggttttcttttagagtcagccacactaactctttttgatcattaagatgctctttgcggtaaccttctgtaggtaaagggagacatggtacattacacctagaggtaaccaaaggagaaaatatatttccctaggtccatctgtttcttgttttaccttctcatttattcattcactgagagcatactctgtgcctgcaccatgctaggagctggtatgcagcataaataggaaatacataatcactgcccccagggaacagcctcttcaaatactcaagcctagtgtaattaaggtagctccctccggatctttgaaaggctttaacagcgatagcccctcaactgagaaactttggatgtactcagtgaactaagtcaaagcctcagatatttgggcatgggaattttatgtaaaaactaaaggtgcttttaaaatatcataagcggctactattcactctgcccgccccccaccaagtggtttcaaccaggggcaattttgcgtcccagggatatttgatggagacatttttaatagtcataactggggagagggtgttattagtatctgataggtagaggccagagatactgttaaacatcctacaatgcacaggacagtaccccaaaaagaataatctggcctcaaatatcagtagtgttgagtttgagaaactctgttttccaccaatacaactgtaactttttttctacttttaatcaagaaagacaactattttgaaaaataatgctatacttgccgagtttataacttacatttcacattaacagtaagctgtaattggtatttacatgtatcttgactatacagttgggtttttttttccctgtctttcacttgttatcacattagatgttgggaaagaactagtatttttgattcccagtagttctgcctgactctagcttatgagcagaaaacctcttttgatcttcaacttcttgcctctaatggcctcagcagacattctatgcatctgcccccatcacctcttgtctctttctcagaaaggtcctgggaatttagtattctttctttagagatagaaaacccgaaagcaaaaggagaaggcttaatcaaggtcacctagcagggctttgcacgggctttctgcctctcccttggctcattattcactggtcccttcgggggaaatgtacactataaatcagaaaagactatcatctgtactctgctaaatgtgtaaaggttaaatttagtcaggcaggtgatttatacttgcttatttcctttaaaacctcatggagaattaagggagttttcagctaggatgacaaggaaggaaatctaatatttcagagttctgctgttattcttcttggagtatgaaactatcatttgtttaaaaattccatgtatccaggaaggcttgcatcagaatacatttttgtagacattaactcatcataatttgattaaacaaaattttggtgttgcatctgttaggaatatcctgagtcacatcatccactcaaggcagagaaactggtctgcaaaagcaagggtcgagaagtctcatgaggaatgtagtagaccgactgggagaaagtttctaagaaatgatatgaaagggtttggtttggttatggagatcataaagtgacagatttttataaaactagtggaactgccagcttaggagattttcacgcactaagtcaggccattcactttctttccttaggaggcaaaaagcaataattcacagttatacataggaaaaaaagcatattccctcctttccaatgtaccgccctcccaccttttctcattacttattttcctttcttgtgatttttttctttattattatgatcaacacatatcagacaatatttggtgtcaaagatgtacttagagtaaacaatatttcctaaggcctcatttacaatattcgaaacttgacctggagagcaggtagatttttatgttagtggccccactgagaaatggagaacaaggtggttcaccatggcgcagggacattttgtgttgggcatgacaaaatatttgaaattaacagttatgcccatcaccacagtaaaaggtgactttcagaatacttaaaattcaatagcttagtaatgtgtgatcttcatccacccctccacctccacctctccttgctatttctgaggttaagacttgtactcttatctgaggaacatgactcagaattagagtacatagtctatggaaagatcatcagccttgacttcctgggctcaggtgatcctcccttctcagcctccgaagtagctgagactgcaggcacataccaccgtaccatgctagttttttttttttttttttttggtagagatggtgtttctccattttgcccaggctagctcaagtgatcggcctgtgtgggcctcccaaggtgctgaggttacaagtctgagccactgctttctttatatcactttactacgtaaatgacttcttagttgtgaatacatttgatttagtggtaaataaatttcttctccctgggttgtggaaatatgagtttctaatttcatgacagaaaaactcagcaaccaactgtatttcttaattatactttcatctgaatgctgcttgtcttaatttgttatgctacaaatgacataatagtaacccaaagatttgccgtctaaacatgtgtcttttaaaagctcaataacttaatggtgcattttcggctgaagccagtgttttgttcgtacaattcatgattgctttctgttaaaaagcatgactgtatattagaatagaatttaacccaatttattatgctaaggcatgaacaatcaatggaacataaccaacgattgaatggtaagactcgaagaaaaaaagaaactgccaatcaaccaaatatttgcaaaattagttgcaataggctgaattttgtgtcccctctaaaaattcatgtgttaaaatcccgacacccaagatgatattattgggaggtggtgcctttcggggtggggccttttgggaggtcctgccctcatggatggaattagtgatctggaaaaagaggccagaaagagaaaaagagtggggaaaactctgaccccgactctcatcatataacttacatgaacatcagcattccagaagacggctcagtggttctttgaaataatctggaattaggggatgttgtctaaatttatctgcctgcatcttgttccaataaatatataaattataggttcaggacttccaaaacagggcaaaaactgaactatcagaaggcatggcaaaaacagttacagctaatattgagaaataacaaactgtatatacatatactcgtacatttttctatttagtattcatttatttatttttccaaaaggaataagacccacagttttcaatatattctcaagtgatccataaactataagaaattaaaaactgcctgtaaaaatctgcatgataaataatatttatcataatgatactaaaatgtaaacaccataaaggcaggtgttttgtctatttttgttcacttttctatccccagtacctgggacatagtagggactcagtaaatgttcattaaatgaaggaagaaatcacacaaatgcattgtaagagcatagtattctactaaatagctaaagaaaggccaaatgttattcaatacaaattaaatgttcctgctttctctcttttttaattttttttaatttttattattatactttaagttctagggtacatgtgcacaatgtgtaccctagaacacgttgtgcacatgtaccctagagcttagattatagctgttaagcagaatattcaaatgactagtgccttaggccattgagggtgctgtaacaaactaccataaactgggtggcatataacaataaaaatttacttcttacagatctggaggtctgggaccgccaagatcaaggcaccagcaaattcagtgtctggtgaggtcatgcttcctggttcacagatggctttctcaccgtgtcctcacatggcccaagagacaaaggaactctcctccccattgtctctctctggtctttattatgaggtcactaattccatccatgagggcagtcactctcaaaaggcctcacctcccaaaggcgccacctcctaatacaatcatcatggatgccaggattttaatatatgaatttttaggaggaacacaaaattcagtgtattgcaactaattttgcaaatattggctgattggcagtttctccacttttaatgccattcattggctcatgctgcctaaggagtcttgtggcttttgctcttttttgctttatctgcccatttgtcaattttctgcaagcctggtggagaccaagcaactcaatcagctcttcctcttcctattgccctcagagcacctcctagtggcaaaaagcaggcattgtaatcccagcaaggcttttgaaatttgcttctttcatccatttatttagttattgcctgcaaatgtttcaacgataatgtaatgatccctctgctgtccaaaggtttggagaatgttatgaaagaacatttttgtttttttctgtagcctctgcactgacctgtatttctgttcccaggtgacttgtaccacaatttggggcaacagaacatgcatttaatgttgggtataaacttttaataattagaaaactgagaatgccaagaaactattacatggtacatctgtataagagtatttagaataaaatgtatgtgttttcttaacacaaatcaagtaattttgggagttgataaaaggctaatagttcagaaaattaaaattatatgttaaagtcttctatgaaaaatacttaacataattgccatgtgagagagctggtaaacattaatgaaatttcaaaatcagtgcatagaagagggacatggtcgatggttgaaagtaaacagcagactggccagaaatctgattacaaagaccatgcaaaaatgaatagggcctgaagataccaaattccttctgttttaaaccaaattgattttcccctaaaagagtgttaataaaatacttcacatagtgagtttaacttttctttctcagtctctaagttatctggtataccattgtttttgatgaattgcttcttccttagtttatgttttgtgtcatttcaatctaaattggttcaaagggacaccttcagattttcttcattggcaatgactattgagcccctatgagagtacagtagtccccccttatctgagggacataccttctaagacccacagtgcacattttctatacatacatacctgtgagagttaatttgtaaattaggcggagtaagagattgacaacaataacataataaaatagaacaattgtaacaatatgctgtaataaaagttatgtgaacatggtctttttctcaatatcttactgtaatgtactcacccttcttgtgatgatgtgagatgtgagatggcaaaatgcttacgtgctgagatgaagtgatgtgaatgacgtaggcattgtgacttagcattaggctactattgaccttctgacctattgtcagagggaggatcatctgcttcaggtgattctggatcattaagccacaaggatgacgaaggttgggagtcagaaacagacagtgtcaatgactgatgggtgggttgtgtctacagtgtgaatctgctggacaaaaggatgattcctgtccagggcaggacaaagcaggacaacatgagatttcatctgagatttctcctcagaaccacgtgcaattaaaaactaatgagttgtttatttctgaaatttttcatttaatgttttcagaccatggttgaccacaggtaattgaaaccctggaaggtgaaactgcagataaggaggactacagtgttcaactatttacaaataatgacagtggccacaaagattaccttgaaaagagaccgtgagacagtttcacacagactgtgcctggatttccatgagtctctgccaactgctttttaaggtattataccatataataatgttttttaaatcttttagttggaagtgattttttttttcttgagacagagtcgcgtgctgtcacccaggctagagtgcagtggcaagataccagcttactataacctccgcctcctgggttcaagcgattctcctgcctcagcctcctgagtagctgggattacaggcacctgccatgatgcctggctaatttttgtattttcagtagagatggggttttgccatgttggccaggctggtcttgaattcctgacctcatgtgattcacctgccttggcctcccaaagtgctgggattacaggcatgagccactgtggctggcattttgaagtaattttagactttaaaaaaggtgcaaaaatagaatagagtactccgtatactcttcatccagcttcccctgtataactatagcacaacattttacataactatagcacagtcatcaaaaccaggaatacagtactgtttcaattttaaaataatgtgccttagctgatgatgttcttgctatacttttctttctcatctctttaagtctttgttgcttctcttcttcagaaagagtaaaattgaattctagagaggtccactcataagaggcagacctgggcaatgaactcgtttttttgccctgtgctcttgaaactggattctcctttctcaacagcgttaagcttcagttctctatgttgccaaaagccaaagttttagcctggggctcagaatattggcttatttttcctgtataaagaactgtcagactcttcttgacaggggttcatattaataaccctaatctccatctcacggtagaacatgctgtctacttaataagaacttttgccccttttctgttaatgccatccctttacacaaaaaatgaaatacatatatcatgaagctaattatgttcagcttaaatatttatttcaggatggttctaaatcctatctctggtctggtttagtgattttcataatgcttagacatgatgaccatttcaaactgaaaccaagaaagaatatgaatatttctttataaaaataaaaacacttttctttaattaaaataaaaccaagaagtttcatgtgaaaggtcacatttctagctcgtgctgtgttgtcagcatactcctccagccttcttctctctctctctgtgtgtgtgtgtgtgtgtgtgtgtgtgtgtgtgtgtgtgtgtgtgtgtgttgttttgggaatgtgtatagcatcttatcaggagctgttggtttgaggtcaatgccatctccactgtcatcccgatcaacagtaaatacaagagtagcttcatgttctccacaacaatagaaaaatccctcctgggatgttctttgggaagtacaagaaaaagccattaaaagtttcatgttgacctttcttgctttacagaggtttgttggcaggaagtgtcttggttttcttgatggcagagataaagaaaaaaagaaaaaaaacaaacgtgaaaaattccaaggatcaatttgctattcagtttggaaaatagttatttacaagaagcactgtggcatctacaagatcttgctacctcacccaactactccctccctaatccaaaaaaatgagagaaacccattgcagtctgtggttggggttgattaaacatcccttggggccctaatgccctcgaaatgatgtgaaatcactgggttgtgtatcaaaagggcagggtgagctcctggctcatctgactttaatctcaaatggctccacactggtagttgagaacagacaattacttcattaacttttggaaagtctgaggcatttgtgttgctttctggactgtgctctgctacagggagagaaaagacgaggtccaacgaggccattcatgcctgccaagttttcctttctttccaatccaggaaacatacattggtagtgggtaagatccaatattttataatgctaagacagagagactcacccactgaacagcccagagtgaatattccccaagtcttggctggcatgtaagcccagaatcttcacccttactctcaaaccttttgccacctctatccaagaattatttttaataatgtcatgttctcttctttcccttaaataaatccactcatatatgaaaattaaaaagatttatgtgtagggaatcatacacatttgtcagatttatctgtaactttaggaatttttttttttttttgagacggagttttgctcttgttgcccaggctggagtgcaatggtgcgatctcggctcactgcaacctccgcctcccgggttcaagcgattctcctgcctcagcctcccaagtagctgggattacaggcatgagccaccacgcctggctaatttattttattttatttatttaattaattatttatttttagtagagacagagtttctccatgttggtcaggctggtctcaaactcccgacctcaagtgatccgcctgccttgggctcccaaagtgctgggattacaggcttgagccaccgtgcccggccaactttaggaaattttagagaagatttagaggatggtttagagaaaaatattatgcaggagacattgaattgttaggaaaagccactgtagaactgggggctgttattgccaaaaatattagtttggtacaaaagtaatggcgttttttgccattactttgaatggtaaaaaccgccattacttttgcaccaacctaacagttaaaccagcaaaagcgacacacattttacaaaagagtcatgtaattctgtatctgaaactgccagcagcagggtgttttttcatccattactgccatctgaatattttcatctttttgcctctgggcattaaaatgcaactaatccaccacccacaaaacccattagcataaacagtaaaaaaatgagtggtcagactacacagtgatagcactgaaattacttgagtaaaatgcagatgtaatgaggatgtcagtttcagagcagtttgcatcataatagactgaactgtcttggacttcaattctgggttcttttctagatgactattgtcctttttttaaaaaaaagaaaacatctgtgtcctgttactttttttttttttttttttgctttcccccaaagttttctgatgttagaatttagaattttgtctactgtttaaaaaggaaaaagaaaaattttccactagctctcctttgagagaatgagagaattctaattgcttctccactataaaagcacaaacttccatgaaaatggtcatcggagagcagaggtgacaggatgtatactgctgaacttttttgcttccactcttctagataactgctgagaaaggccccctttagctttgatatccaaaaggcaaaacaaagaaggtaagcacctttcagcagggcaaggacaactaatgtgttcttctgcccactgcagctgagacccatggtgcacctgcattcttttaactgagacaacaaaattctccctttaatccccttttggaaggaggagggagagagtactaccatgatgtatgtattttcctttccttacctctttgttcctgagtttttgcttttcagacaataaaatcattagaattagaagaattattattattattcctagtaatgtagcaactgtcagttccaaacaagcctccttggctctgacaatcccatgctctgctatacaacacagtgaaaattgggagcataaactcattctgttgcctcaacaaaattatattatggggtgaagtctattggggatggggcagggtacttcatagcatgaagagaatgcagaataatgttcttagtcccctgtctgtgtggcctattgaaagggaagagattataaaccctactgtggagttaataaaagtagaatctgtaggccagggactgcacgcaagttgacctctgttggggaaagctctgggggtacagtgctgagaacctctcctgggagtcagatgttttttgaattatctttctgtttgaagaagaatctgccttccattcattcattcagggctcttttgagtagcccatgtttcaaatgagccaggagggaccagacatgtgattataaaaatacattgaaattgccaaggtggagtctacagcagtggtccccaaccattttggcacacgagggaccggttttgtggaagaccatttttccacagaccaggagtggagaggggaggatggtttcgggaagattcgagcacattacatttattggacacattatttctattattattatattgtaatatataatgaaataattatacaactcaccaaaatgtagaatcagtgggagccctgagcttgttttcctgcaactagatggtcccatctgggggtgatgggagacagtgagagatcagaaggcattagagtcttataaagagagaacgaattagatccctcccatacgcagttcacaatagggtttgtgctcctatgaaaatctaatgctgcggctgatctgacaggaggccacgctcaggcggtaatgtgagtgatggggagcgactgtaactacagatgaagcttcacctgctggcctgctgctcgcttccctctgtgtggccctggttccagagattcctggtctacaggaactcgtctctcttaggtcttttttcttgaagagggatttgctttcccaaacttttttttttttgagacagagtctccttgcccaggctggagtacagaggtgcaaccttggctcactgcaaccttgacttgccaggttcaagtgatcctcccacctcagcctcctgagtagctgggactacaggtgggcaccaccatgctgggctaattttttgtatttttagtagagacagggtttcaccatgttgcccaggctggtcttgaactcctgggttcaagtgatctgcccacctcagcctcccaaagtactgaggttacaggcatgagccaccgtgcccgacctttctggaattttttttttttttttttttttttgagatggagtctcactcagtcgcccacgctggagtgtagtggtgcgttcttggctcgctgcaagctccgcctcctgggttcacaccattctcctgcctcagcctcccgagtagctggtgccgccatcacgcccggctaatttttgttttttttggtatttttagtagagacggggtttcaccatgttagccaggatggtctcgatctcctgacctcgtgatccacccgcctcagtctcccaaagagctgggattacaggtgtgaaccaccgcgtctggccctttctggaattcttgaatctttaataagattctaggctatatgtgcctttggttgaattctcctgagttgtttctatttctctgagtttgccatttttcttcctctattaagtatctgtattccagggttttgtgtaattcaccaaagcttttataataatttctaagaacaattttgatcaaagacctaagaagacaaataaaattcttcagtaataggtataattttcatcaaatgattgctttcctttttttattgttagggctctattgctaaacgtgaaaggggagctgtctcatagataaaaccctctggtgttctgaaggatgaatgggaacagtggaggcaatttatcagaagcctgtttttctctgccaggtcctccagcccatttcccccaggtccatggagaggaaactctcataggaaactgacataaacatagacatttcactttggtccagccaatctaccattaagaatattcaaatccatttatgaatggatcttgagaaagaaaaaatatattgctatgttggttattttgtaaacgcccaatgggttcactttgcttgcctaaacagagccaatttatcaagacaggggaattacaaaggagaaagaatagttcacgcagtgccagctttgtgggagacaagagttttattgttactcacatcagtctccctgagcattcagggactggtgtttcgaaggataatttggtgtgtagggactcgaagtggggagtgctgattggttgggttaaagatgaaatcataggaggtcaaagtgagttcttgctgtcttctgttcctgggtgggattgcagaattggttgagccagattaccggtctgggtggtgtcagctggtgcgtcgagtgcagggtctgcaaaatatctcaagcactgatcttaggttttacagtagtgatgttagtcccaggagcaatttggggaggttcagactcttggagctggaggtcgcatggcccctaaactgtagtttctaatcttgtagttaatatgttagtcttgggaaagggttattatcaattttgtttcagagttaaactataaactaaatttattcccaaggttagttcagcctatgccaaggaatgaacaagaacagcttgaaggttagaagcaagatggagtcagttaggtttgatctctttcactgtcatagtttcctcagttataatttttgcaaaagcagtttcactttctagtgtctaatattttagtaagtccttctccttcctcccattttcctacctttttgatcctttctctgtgctacttgccaaagtgtgccaatttcaattcactcatttattcaacaactactccttgagcatcatcatgcacaaggcactagactaaacactaaggattcatccgtgaagaagacagacaaaaaaaaatcttgtctttgcgaagtttacgttcttgtgagaggaaggcaataagcaaataaaagagtaaaacatatgagtcagatggtgcccaggagaaaagtgatgaagagaaggatatatgaaatgcttcttcgtatgctgttagggcaggggagagagttaagttttggcaaccatggtcaggaaaagcatcatcaaaatggtgacatttgatcaaagacctaagaagacaagggaataaggtgaacagataaccagtgcgttgcgatttttgggtagggctcagtggtgaatgctcctgtctgctccacacggcatccacagaggcgtggtggtggcaggtgcctgtagtcccagctactcgggaggctgaggcaggaaaatggcgtgaacccgggaggcggagcttgcagtgagccgagatcgcgccactgcactccagcctgggcgacagagcgagactccttctcaaaaaaaaaaaaaaaaaaaaaaaaaaaagatggtcctaatttcaacaccttgtatgttaagtctctggataagcattaccacctttaacagtggtttataagtaaaaattgtattttgccacaaatctgcaatttgggtagggctcagtgaggaatgctcctgtctccacacagcactcaacagaggcagctgagccgaaggatgggggtatgtttccaagatggcgccctcatgtggctggtgagttggtgttggctgtcagcttgggagtttggctgggggcctcagttcctctccatgtgcagtgtgcacctgtatgtgcaggaatggaggaatggagttatcatttactgagaagtgaaaggctaaaggaggagcaagacatctggagtcagatgttggacacattaagcgtgagatgtctgctaaatattcagcaggcaactgggaacctggagttcagaatggaaattataaaaagaaattgccctaccaagggaattaacatccttgtctttcattactagttaattatgctgagctgaccaagacaggaaatggccattacccatacttatccctaatagaatgtgtatatttatccaaatgtggtagttttaaaacaagttctttgacattcttcccatcaagagatggaatctatgtcccctttccttgacctaggcaggcatttgtggttgccttggaaccaactgggtatgacagaagtaatgttatggaacttttgagggtgaggcataaaaggcaatacagtttctgcctctctctttgggatgttcatccttgaaacccagccaccatgctctgagaaagccagggccacatggaggtgcacattgcttgtggagaggaactgaggaccccagccgaactcccaagctgacagccaacaccaactcaccagccacatgagggcgccatcttggaaacacattcctcatccttcagttcagctgcctctgtgagtgctgtgtggagacaggagcgttcctcactgagccctactcaaattgcagatctgtggcaaaatacaatttgtactgtataaaccgctgttaaaggtggtaatgcttatccagagacctaacatacaaggtgttgaaattaggaccatcttttttttgtttttgagagggagtcttgctctgtcgcctaggctggagtacagtggcgcgatctcggctcactgcaagctccgcctcccgggttcacgccattttcctgtctcagcttcccgagtagctgggactacaggcgcccgccaccacgccaggctattttttaaattatttttagtagagacggggtttcaccgtgttagccaggatggtctcgatcttctgacctcgtgatctgcccgcctcggcctcccaaagtgctgagattgcaggcgtgagccaccgcgcccggccaggatcatcttctaaaaaatttttttttagccattgtattgctagtgcctggcattgtctgagtatatgcagtaggcacgcaatagctgttttaaatgaatgaaccaagatgaaacatctgtgaccatcttacaaatggaaggagggaaggttgaaaacactgagaaagtctcctagtttggaggaatagagttcagctcaggaagaacgtagttcagggtaatttttttttttttttttttttaagacagagtcttgctctgttgcccaggctggagtgcagtggcatgatctcggttcactgcaacctccgcctcctggattcaagcgattctcatgcctcaggctccagagtagctggacttacaggcacatgccaccaagcccgagtattttttgtgtttttagtagacacagggtttccccatgttggccaggctgatcttgaactaacctcaagtgatccactcgccttggcctcctaaagtgctggggttacaggcatgagccaccgcacccggccagggtagttaaaaattgtatgctctgaatgtgtaaaacaggttgtccaagaaatcttatggacaataaaagtcatttactttggaaattattctaaaacattttgaaatagagcaatgttagaaatgagatgctgcctctgctagttgcctcagagctggttagttagcagaggatagattttctcggtttaatagccataaaggatcttcatattctgatttgatctgcaaatgtattcaacaaagtgactgcatgatgaaagcaagaaaattatataaataatttccactccaatttttcgtatatgcccaaagtcataccagtgtagagccttaacatgtttgtatgtaggggacagggaacagaagcgtattaatagacacagggccattcaaggatcctctacaagacagtcattcctgattgactagcctaaatcagaaaatggtgtgtatggttaggccaaaattagtctcttctttttttttttttttttgagacaggtctggctctgtcacctaggctggagtgcagtggcacaatttcgtctcactgcagcctcgacctcccgggttcaagtgattctcctgcctcagcctaccgagtagctaggaatcacaggtgcgtaccaccacgtccggctaaatttttgtatttttagtagagacagggtttcaccattttgcccaggttggtctcgaactcttgacctcaagagattcacccgcctcggcctctcacagtgctgggattacaggtgtgagccactgtaccttgcctacatcctgtattttctaaaacatgcattgcatttataatcatagtgcatattttaaagcaaagacaggaatctgggtctcttaactcaggaaaagatttaggtttaagttattgctttgcatatatgaattataataaatacttttcatgtggctgatgttagacagtgtagagaagagaagcaagagcagaaactcagggtccaccagcatccaaagcagtgatttttatgatccttcacagcttaatcatgggtgtgtgtgtgtgcttgttgaaaatgcagagtcctgggtctccagagatgatctcagtaggcccagaatgggatctggaaaactgcaatgtttggccaggctcataggtgattctgatgtaggtgaattctttgagaaacagagatgtgaaggacagtgcttctcttacctacaggactcaggtaggagaaaaatgagacagtcatggctgggaagccaagggacttttgggaaaatatatgtaaaatgtactaaaagcacattatgatgatataacaagatgttctccaccacagctgtgtattagaatcatctggggcactttaaaaatataccagtgtgcagatttcctcataatggtggtaaatgtccctctttcagcatgactaagagataagagaagctgcaattttccaattatctgtgcatagaagaaaaaaaaatccaacagagtgcccactgtgggcctgcagcaagcagccaccacaaacctatgggtgcagaaatcaggggagaggagtctcaagagattggggaaaagggtggagggaagcagagaacttagagaaaaaacagacaaagccactcccaaaagataaagtgaaacaatatttacaaagagaatgaacaaggccgggcatggtggctcacgcctgtaattccagcactttgggaggccgaggtgggtggatcatctgaggtcaggagttcgagacctcctggccaacatggtgaaacctcgtctctactaaagctacaaacattagccgggtatggtggcgtgcgtctgtaatcccagctactcaggaggctgaggcaggagaattgcttgaacccaggaggtagaggtttcagtgagccaagattgcaccattgcactccagcctcggcaacaagagtgaaactcggtctcaaaaaaaaaaaaaaaaaaaaaaaaccaaaaaaaacgagcaatgatgggcacttggcagttcagagcccaggctccggagtggggcctgacagtgtgcagaccagacatggagaatccatgcttgttggggagaatcagacacagggagaggagtggtgcttctgggagacaggcacagcagaagaggagacagaacaaaattaagcatcctgcagaaaataggagacacaacaactcttctatctttcctgtcaacatcagccacagaagcaactgcacagaacattgttgaactgagggaagaagctgctcctaactaggtctcctgcccacagaatgaacaggaagaggaaggagtggaccaacttctatagagaacaactgccaaagtcagaagttgcaaatcaaagtttttctgctggtgatgtctcctcgatataaccatgaacttgatgaaaattctaagacaacactcaatatttatgaaatattctccaacctgcatctgggaacatggaaaatatcaatatgttgaatcggaaatataaaaactaggtagagaaatcaacaaaaaataggagaaaatgaagccagagctgattaaattcaggaaaaaaaatagaagaaaatcacaaaactttatcagtaataaagaacagattacaaggtgccccgaagagaatgggttcaaataaaaacttaataaagggtattgaataaaagaaggatagccaagagaatgaaaaggagataaaataaaaaggaccagagaagatagttgaaatggaagccagacaaaggaggttgcatatttgtattattggtgttcctgaagaaaagaaaaacaatataacagaatatttaaaactctaatccaagaaaaagttccagaaataaaagaactgagtcaactctacactgaaagggcccagtgtggtatataggaaaactgaccacaaataattctgagatagctcggaaaattattagacttataaaaaaaaaatcctcaaggcttccaggcccaaaaaatatttacaaagagaattaaagattggcctcagatttctcaaaaataacatgcaaaccaagaaaacactggaacaccattttcaagaaacctaaggaaaaacaagctgctcttcaagtttcaaggtcacagaaaatcagtttcaaactcaccagaattccaggaatacagtacacgtgctcttgctgagcaatttactggagggtgagtttcacccaaccagaatatttctgggaacaaaaggaccaacagagatcatttcacatatttgactgtagagctgagaataatgtaagagttcgttcatgggttaatgaaaaacatggatatgtaaacattatatactgataaagtagaacaaatacaactaaaaaggtgggagaagggagagaaaaggggaaaagtagagtaacaccattgactgacatataggtaataggtgggaatcagtatcatctagaaaagacagatagtaacaggttaagaaagaaaaaaggggccgggcgcagtggctcatgcctgtaatcccagcactttgggaggccacggcaggtggatcatgaggtcgggagatcgagaccatcctggctaacatggtgaaaccccgtctctactaaaaatacaaaaaaattagctgggcgtggtggtgggtgcctgtagtcccagttacttgggaggctgaggcacgagaatggtgtgaacccgggaggcagagcttacagtgagccgagattgcgccactgcactccagcctgggcgacagagccagacttccgtcttaaaaaaaaaaaaaaaaaaaaaaaaaagggagtaagagcactacagaagattagtataaaagcaacccattagaataaagatacaagacccagcgcggtggctcacacctgtaattccagcactttgggaggctgaggcaggtggatcacctgaggtcaggagtttgagaccagcctggccaacatggtgaaaccccgtctctactaaaaataaaaaagtagttgggtgtggtggcacgtgcctgtagtcccagctactcgggagaatcgcttgaatccgggaggtggaggttgcagtgagccgagatcacaccagtgcactgcagcctgggcgacagagtgagaccccgtctctaaataaataaataaataaataaataaataaataaataaaagacacaaaattcataagccaaaagaaaacgcaagaggatagacacagtaaatataatacattcagcaattacaatctaaaatatgacagaattgacatcaaacatggtagttatatcaaaactagatcggcttaatttgcctattaaaaaagattattttcggattggctcgtatagcaaaaactcaactgtgtgctgcacacaagatacacaccgaaaatgcagcaattgaaatagctaaaaataaaggaatgaacgaaaatttaccagacaaatggaaacagtaagacagcaggcattgcaatcccgatacagaagtagagacttcaagccccaaacagaacacaaaagaaatatagagctataaaatggcccttgggcatatgaaagaatagcccaattattcataagataaatacaacttaaaattgtactgagattgtactcttcctgacccatcatattagccacagcaaagtctccccaaatctcattaatcttttttgcgcagcagctactcctataattctatttggcagcacttcagttttgtataaattacctattgattaatccccagaccattgggagaatactatcaatatacctcaatttaagaatcaagattataaggcattatcttttcataattatatatgtatgtatatatacatttggctagacatttttttcattagctttaaaattgtcagaggcgtctgaaccagagcaactccattttgaataggggctgggtaaaataaggctgggacctactgggctgcattcccagagggttaagtcattctaagtcacaggatgagattgtaggtctgcataagatacaggtcataaagaccttgctcataaaacaagttgcagtaaagaagccggtcaaaacccaccaaaaccaagatagcaatgagagtgacctctggttgtcctcactgctacactcccactagagccatgacggtttacaaatgccatggcaacatcaggaagttaccctatatggtctaccaaggggaggcatgaataattcagcccttgtttagtaaataattaagaaataacaataaaatgggcaaccagcagcccttaggttcactctgcctatggagcaaccactctttattttcctactttctttaaaacttcatttccttttcctctatggacccgccttgaattctttcttgcatgagatccaagaaccctgtcttggggtctggattgggacccctttctggtaacaaaatgatcaaagttaaagctgtagttactgtaactgagttggccttggaatgccatcccatatagtgccatgtttgagagctggttttcatttcattggtggcattagaaatgtactattatattagggttaattcgccctgctaccccaactagctagctacctccccttgggccaggcaaaatggaacagtagcttgtacatatgaattgttaacatgtacatatcttcatacagcagtcatgtctaactgtccctaacagggcaagggagatgaccggtcattttttctcatgaaaacaagatacactcaggtgagttttgagtttgttcaccatgcagaatgtgacgagataagtttaattttctagcttagtgtttttagcttaaaatgttgcaatctaaagctaaaatgttcacctgaggccaaggacaacacagcaaaaacaacagggccaatgtgtcctcagacctttggaatcgcagtcagatatcactatgaactgagtgtttgtgtttcccccaaatccctatgttgaaaccctaatccccaataatgggatgtggaggtgggacctttgggaggcagttaggattagattaggtcatgagggcagagcctcacgatgggactagtgttgaagggaaatgaagagaccatcttattcttcaccatgtgaggatgtgaccaagtatcctcatttttctaagaaaaagagaatgagttactatttttttctcttcttttctccattttccagtttcccatgtcctacttagccctttagaaatgcaattataattgtttacctctccttcacgagacactccctacagggcaaggctgtctaacatgtgtttcaaagctccagtgaaactctccctcaccaggagactgctcaggagacaacagtcaatttacaacccaaattatgcccgctacaaaactctcccccacctggagactttcggacacctttgtaatcgaattctgtccacaaagacgtcaactcaaccgcctggtagataaggcaccacaacgagtacagggacctccacctgctcactgccttccctgcatgtcattcgtgccaggccctccttttatttatttatttatttatttatttatttattgagacggagtctcgtctgtctcccaggctggagtgcagtgagccgagattgtgccactgcactccagcctgggtgacagagcgagactctcaaaaaacataaataaaataaataaatatcctacactggtcaggacaactcccttcaacaaggaattattccctgcaaaatgttagtagcgttcaggatgagaaaccatgctttacagataatcagctgtcttaatttttatttccctggaacttttccctttgtctctcatttgggacaaacttgagggccaaaatatggcagcaaaatgttttagatcaagtaaagactgtaaattaggtctatgaaatattttcccagcactgggagacacatgttggccccaacttcctactcagacttgcaattaagacacaacaggtgtgggtacccaacatgcgaagacttctcactggtctgtacgtcagtaaatggtcaagattgttactatggaatcattcacaccagcacaatggtgctcctccaagaatgtatttatttacatgaaaacaccattttatacaaattgaagacacatcttaaaagaagggtttgtccaggcatgccttcctcatccccttatattgccacttccattttcatcttcttttgtatcataaatgaaacttcagactggttaaagaaaattgaatctgcctcttctccccacccaaaattacttcgattatttaatgtctgtagtcatccttcaaagaaaagtcttgcccggggttattttatttaatttatttatgtaatacagtgtagaaagcgatcatgtcataagcaatgattctgtacaatcatcctgcagaaaattgttttggagaattcttggtaattgaagaccagcagagcacccctccccacccgccccgtaaaagtgcttacaatgaacagggattcttttctttatcaaagacccaaagatacgtggacaaaaaaagaaaagcttgaagtctcaatgcctaatgtgtgcacataaaacaggcacgaagaaacaaacgtgtgtatcctcttaattcctatatcacaaatatagcagaagcagcaatctgtacagtaaaatgcagtcatggaaaaaaaatctctctaaagcatctgaaatacttaaaaatgtttaactttaaaatgcatagtgatcaggaaaggaatacttaggcaagagaagcagctgaactcccacgttcacatgaagcatcccccatcgattcttaaagcatatgtaaagtaggacttaattgggtcacaaaccacaagaataatatacaactggctaaggggctatgtgataaataatcaggagagaatctattcatgcactagtttgatacagctaaattctttacagtacacaaaacccattaataatgtagtatagagaccaaaatgtaaagagagatagaatacattactgatgtgtggattaattcaagttcaggcatctacttgtgttacagcacagctgtcaaaaggcgataatgagtaaatcataaaacgggtttgtttcttcccacattattctataaatggacaccgatgggtagtgaagcaatggttttgctgtccaacttcagaggctgctgtggcgggggtctagttctgcatctgctcaaagaacttgtaggttggattttcgtagccgttctgctgcatcttggacaggtggcgctcctctggggtgacagcggcgtcaacctgaaaaacaagaggagagctgagtaaaaaataaaaatcaatcttttaagggtgaacatggagaagcagtaaaaagataaggagtacagtactcttcttttgccaagattgcagaacacccataattttctcccccactttgacatcttggagcagaacgcctttgcccaccagttacacagatgctgtgctccatctagccaccaggtggcggtggaaaccttgacgcgcttgcaacgtgtccagtggttgtttctggttccccaactccacagtaagtggataaacccagtgcaatggtattttttcctcccctgttgggtccataaaggacaaacagagtcaacggaagcctgttttacgtggaagtgttttggtaaaatagataaaaccacaagagtatcatggagggagattcagcaaagtatactgtatcttgggtgacactcaaatctgtgtagaaaaatactcgatttcctggactgctgaatttagtctagcccatttctatcaaattttatgtttgttaaaatgttaaggagaggtttgagaatcaattaaaacaataacatataccaaagggggctattatttggcacaagaaaaaaggaagagcaaggacgacgccattctagatgatgtaattttttaaaaactgagaattaagatactatagaagtatgttcagctcaaagtttaaaatcagaccctctctgttaatatgttgctttacctctaaggtcaggccagtaactgaagacgtttttctccccctgtcactgttagagctgtgtgtggcatttactgtctgcaggttgggcagggtacttacccctacaacgtgggcagtggctgttcttgttttactatatttgttatacctctccccgttcgcagaagagaggaggtccttaactctgctgaatgagtatgttaaaattcctcttttgtaaaaccatggtaagatgaagagaataaatagaaagtcatcagaatgaagaggcatgttttccagagaaaagtttggatgtaccatagagaagatattccttcaaagggatatttcctagaatgggctgctcattcatctctgggagaatactgcaggcccattcccccttgttgagtgttgccaagtgacattcctcccttatgcagcttttccccctacacaccccatctggcatggatctgagcctacacagcaatgcccctgaagccaaggaagaaaaagtaccagcgaggatgtagtgtcagcagtaagacatgaggtctcgagatggagctagatatgtcatgactagaccacactggctgataacaattcagactaaaagatctgtcaatatggccgggtgcagtggctcactcctgtaatcccagcactttgggagcctgaggtgggtgcgtcacttgaggtcaggagtttgagaccagcctggccaacatggtgaaaccttgtctctactaaaaatacaaaaattagccaggcgtggtggtgcacgcctgtaatcccagctgctccacaggcggaggcaggagaatggcttgaacttggggggtggagtttgcagtgagccaagattgtgccactgcactccagcctgggagacagagtgagactccatctccaagaaaaaaaaggccaggtgaggtggctcaaaatcccagcccttttgggaggccaaggcgggtggatcacgaggtcgggagtttgagacacgcctggccaacatagtgaaaccccatctttaacaaaaatacaaaaaaatttagccaggcacagtagcacgtgcctgtagtcccagctactccagaggctgaggcagaagaactgcttgaacccaggaggctgaggctgcagtgagccaagatcgtgccactgcactccggcctgggcaacagagggagactctgtctcaaaaaaagtaaataaataaaaataaatctgtcagtataatcaggtcccctgtggtcccttcggatagccccacttcatgaagtgattgactcttttcagtctgggagtgaggtggaatgactaccagtggctaatcccaaggcagctggaataggtagatatacagctccctcatcccttgggacagaatgttccatccattatgtgcccattttttttgagttggagtcttgctcttgttgcccaggcaatctcggctcactgcaacctctgcctcccaggttcaagtgattctcctgcctcagcctcccgagtagctgggattacaggcacccgccactacgcctggctaatttttgtatttttagtagagatggggtttcaccatgttggccatgctggtctcaaactgacctcaggtgatccgcctacctcggcctcctaaagtagcactaggactacaggcatgagccgccatggccatgtgccccgattcttacgtttccatttatggaagagactgtgcgccactgtgaatccctcccatctaccaccctgtggctcagagctgcctgagttcccctgcatccaaaccctcagcttactccaatgacagacctaggcatctccccttagcacactcccaccaacaagctctgaccaaggccagtactcagaggactctgctcaaatggatgctcagcttcactgtccttctgggagcaaatcacagatattttccttatcctctcctctttcctttgctgtgcactgttgtcaacaaatgaggtcacctggctttaactggtaactgtgtaattagcctccaacttgtaagttaaaaaccatggttaaagattagcaccaatgaatgagagatttcattcactctgtaaatctgtgtgccaggagacagcctatctgcagcagtacgccatttgaacttgggcatcatttttgctccccatcacctcgaaactgagaactcaaagaatgcccaggttaaaaaaaattatcttgcttaggagatcaagcacaaagctgctatgtttctgattgtagaaaaaagccacaatgctgcttgattgttggaatattatacttttatttcttccaggaggcacatctaccatcacactggctgtcaacaatcatttgcatgcatcaagggcaggggaacacctggcaatttgataggtttatctcctcttcaaactccaaagcctaacgcttaagagtgccctgctagagatgcgaggctccaaggctggtgcacaatccagacctctaactctcctgtcttttcttggcttctgttttgctacttgataatcctattaccttttgccactgagaggacagctacattttgccattcctgccatggggcagcttggccctcagaccttagagggcttaggagctacagaagaagggattatcttgacaaaagggcatccaaggagtatggattggatctttaatctccagccccttgaaagctagatgcgaaaatctgagtactcatgtctatggataaaggaggagcaccaagtaagggtagccttcctctccagcaggctcaccaatctcttcctcatggctaagctacagcagtggcatgggccaccatgtgaaggccagccctaccacgaccctgtgcagacagggcctctgcacagacacaatattatttcccttaaagcagagccagggagggtttgagcccatggtgcttgttctggaaggaatgataagacaatgaagtcagaatttccattttccaactgggcaggaacatctgtcacttgctgggatgaagacacacatacatacaaccactgaatattcattctcttcccagactgcctggattacacagcagcaggaaatgatctgaggtcttcatgtgactctcggtacgctgcaccttcctgagacctggacccctgcactgcatggtggcatggcttcaactggctgctgcctatgacacacgctgaaaagagctgagcccaaatagcctgaccagccttgttctaaaatagctttgaggagaacgtttgacactctttggctaacctccataccccctgacccttttctccctgaacttgattcattggaaccatttagtccttcactgtatccagagtaatttagagctcagctatccgcctgcagggacaagattctatttgggtgaccttagtttctaggtctcctcctattgcccctagagtatttacatgcgggtgtgtgagcttggaggagaggcaggaaacaccacgtttacattttattatgtacagtaaccagcaggatgtggattaatagatgtccttttatacaagggactgagtcaggccaaacgacagaatcctgtcattgagatggaccagacgagtaaaggagggtaagggaactaaggcgaacaatacaacaatagtgtgacacatcaaaggagccacaagtctgcggaaaaaaaaaataaaagcaaagaaaataggaagttttcaagctagtgacttatccctcgtaacctcccagtaactgcctgctacctagttgtatagatgcttgttttcctaattttgatgccatctctctatagttatatataactagaaggcagttgactatgtttatggccaacatcaagcaattcttcaggcaggttcaggaactcctttgctatcccttcataattttttttttttttaagacagtcttgctctgtcacccaggctggagtgcagtggcgtgattttggctcactgcagcctccatctcctgggttcaagcgattctcctgcctcagcctcctgagtagctgcgactacaggcgcatgccaccacgcctggctaattttttgtatttttattagagacagggtctcaccatgttggccaggctggactcgaactcctagcctcaagtgatccacctgccttggcctccccaaatgctgggattacaggtgtgagccaccacgcctggcctgtgatcatttttgatgctttcctttgatcttccaatttctcttcctgctgctcactgtaagccactcctaggttctgcaccccccctcacttttccttatcgtggctttccattcaacctgaccactctctccaactactctacaatgccaacgtcagtgcgtctgtatcctggtgggtcagcttctggccgggaagaaaggacctctaaggacatctttttatacagtcaccagtgtgacagcatattacttagaaaaagtcatatgccatacctccataaaagccaaataaaaggaactctcttcttatttagatcattaatgagataaccaggaggtgggggcggggagacttctggtgttcaagtgatcagatctgtgagaggaaaactttttcacatcctataataaagagaagctgtgcccccaacttctccttattaaaggtgacatgtctggggagagtagcagaaagagctacaatacgtatttttaaatatccagtgtctatgtatgtgaatgtagaaaagtaccgcttgctactaaacagatcctgggattagtgggctttgcaggaacgtcctaaaacaggagcaaggtggttaattcagctagtgctgagatttccagccaccagagggctattctgacatggagggcacatttggggagtggtaataataaagggctattgcttcactgcttgaagcaccaataaggcacagttacctccttgggaaagcgtggccaatggctcacagagtgactctctggccttatggctaagtaaattcagtaagtcaatatttcctgcttatttgaaaaaaaaaaaaaaaaaaaaaaacaacaactagcaagtgctcatttccaaatgctaacaactctaccaataaaaatacagttatgggccacataatgacattttagtccacgacagaccaaacatatgatggtggccccataataccgtattttttactgtaccttttctagtttgtttagatacgcaaatccctgccagtgtgttacaactgtctatagtattcagtgcagcaatatgctgcacaggtgtggagcctaggagcaatagttgtaggtgtgtagcccaggtgtgtagcaggctataccatctagatttatgtacatgtactttatgatgtttgcacagcgatcaaaccgccccatgccacatttctcagaacgttctctccagtgtgaagtggtatgtgactgttctaggcttgtttcatttatacatttgttctcaggagtttttttcctagggttcctatctctgtgatcttctgcgggcatttttcactctaaaaacaaaaaatctcctggaaaccaaagctttcatcatgacttcttcaggcacgatggtatgtaagtacaatggtattctgtcctgagtgactgaggtgagtccaactggaaatattgatgtactcatttttgttcttactgaagtagggttactgattaatgaaggttagccagagccggaaataaaggtatttccatgtacttgagggtgagagtgcctgttaaggtaggaagaggatgttgcagaagcatcacttctgtgggtgcagacgctggaatgctaagaaaaatggtgctctgaaagcccaccgtgctctctcacctgggaacatccctaggctgggttgcaactccctgtgttcaggttctaccatcccagctaaactacatcttttttgaggacagaaaagcggaatgtggtctatttcaacattgctgtacagacacactatggggctgcacagagggctgctttcaggaaggacagtcacaaaggtcttgaggggaaggagctgagaggaaataaacaaaacaaacacgaatgaggtggagcccctcatctagaaaggcttccagttgctctccagtagacagcaaaatgaggagagaagagctgaacagccatccttcccgattttgctcctgcaaggatacctcctggcttaaaaattaatgtcagaatctgggtcaaagtgtcaacttctcctctgacattttaagtccaatgagacactgcttggtaaactgactaaaaaaagagcgttttaattcaggcagctggaagagcacttaaaaggcaaccggttatctgggaggtgagagataccattttccactccctgaggcttgcgcggagaactaaaaggaaggagtgttaaaatgatgtgtcagggattctcaaatccgactgcacatctcattcatttggggaaattttcaacactcagattcgcagcctcctatttggggattctttttccttaggtctgaggtaggacctggtctcacgcacagccaggggaaggagctccaggtggaggccttgcttttatgctcagcatcactggggtctgttacgggctaaaacgtgtccccctagaattcatatgttgaagtcctaagctgccagtacctccacctgtgactgtatttgcagatagggtcgaagaggttattaaagttaaacaaggtcatcagggttgatcctaatccactatgactggtgtccttgtaggaagaggttaggacacagcagaaaaacagagtgaaggtcatgtgaagatacagggagcagacaggcatctgcaaaccaaggagagatgcctggggaggaaccaacctggctgataccttgatcttacactccagaaatgtgagagggtaaatttctgttgcttaatccacccatctgtgttactttgttatggaagcccgaggaagccaagtctttggcctctggcatcaaagaaggcaacttcaacggacagaccggcaacaaagagaattatattaaataaactaaaaagtgctcttgaaggccaggcatggtggctcatgcctgtaatcccagcaccttgggaggttggggagggcggatcacttgaggccaggaattcaagaccagcctggccaacatggcaaaaccctgtctctactaaaaatacaaaaattagccaggcgtggtggtatgcccctgtaatcccagttactcaggaggctgagagtgaggtaggagaatcgcttgaacctgggaggtggaggttgcagtgagcggagatcatgccactgcactccagcctgggtgaaagagcaagactccatctcaaaaaacaaagaaacaacaacaacaaaagaaaacaacaaaaccatgaaaaaaaccaaaacaacaacagcagcaaaaaaggggtcttgaattactcaagtatgaagacatctttatttgctcaaatatggaattaaatttttttaaaaattaatttgagcagaaatgaaataagctgatactaatgaaaacctatcttacactgttttgagggacataagcttagatactatcacaaaaggtgcaatggccaaacatgacagtggggtcattgcttttatgtgctcacactctgatctatgggtcagtccgttcctttccaccctgctgcctgctgttctcttggtttccttcctcacactgctcatccacgtcagtatgaatggggaaatgaggctccaccccaatttccatcagcagcttctgttgtagtctgcagaggttttaattgctgagcaaaatgaaatttctggcttcaccacaaatttcatttatttaaactctgcctgtcctcttctaatcaagaatggtttagagcccatttccttggggatagtggaatcttcaactccctagaaacacctggacttttctctgatggaaaaagcaatgggggccagacgcggtggctcacgcctgtaatcccagcactttgggaagccaaggcgggtggatcacctgaggtcaggagttcgagaccagcctgaccaatatggtgaaaccctgtctctactaaaaacaaaaattagccgggcatggtggcgtgtgcccatagtcccagctactcaggaagctgagacaagagaattgcttgaacccaggaggcagaggttgcagtgagccaagatccagcctgggcaacagcgcgagactgtctcaaaaaaaaaaaaaaaaagcaatggggaatatgaggggaaatctggactctgagcttgaccttgcataatttgaacccttctgtctcggcctcagttccctcatctacaagatgagaagatcaatttgattggtcatcatcaataaatctttcagctctaaaaattccataactcttaaaatatcgcaattaaatgtcacacaaatttttcagtttccctgtgcatataaaagttatgtttacactatactctctgcaagacagtttcctaaaaagttgcatatactgtgagattttaacactttttcccccatccaaatggcatttcaaatgcataaaaataacttattcgtaaattttctttctctctttcttgttttagtatagcaccttgaaactaagatatttcaggtggaagtgcagggtaataggttgcagaactctcaaataacaatcatgtatgttttggtgggccatttggtatagtgtgatttcctgagaaactttaaaggtaagagtctgcactgaaaagtcacattatttactattacctggttgtattgagaggccagactatttaagacaaaagaaatccaagaataaacatgtttagtttttttggaaaaagcaacttcctacttctatttttatttttaacttcttgtactggtttttgttgcttgtgtttgaaaaaaaaaagtctaagagtaatcatgcttttttaaagtcatgcattatcatttgtattattttgataacttcaacacaaattgtaagttgagataacaacacacactctcaataccttgagcagaatattcacggtaagttgcaatgaatgaaaaccaaaacaagaaagaacaactgtaacccaagcatcatggaagcacactgattcgttttttaaaagagatacttagctagttcttagcaaaaagctaagcctaattctctcatagtcttaattcccacttggaaacatgcagtcaagtttacctacctccaccacaccatgatgaatggatgtgtactgtttcttcttcagcatcaccaaggtgatgacgatcactgtcgctatgacaacaccgcccaccatgagtccaatgattgcacctttgtttgaacccacatcttctgcaaagaacaccttgaaaacaaattaagaaaaagaattttaatttctaaatgcaatataatttacaatttataaacgcaattagaagaatttcatttcttaaatgcaggggacatttggatgaggttatataaaaagtttcagtatattctctgcccaactggttggtcaaatatttgatgcttactttaaaaaaaaaaaaaaaaaaagaaatcacatattttcctactaagaatgataatcatagtttatagaaggatgtacaacatgtggcttccccagttcgaggaagtctactttccccacaggtcaaaaccgaagtctgcagggacctgaaaccctttgacaggtggaacatttggtgagtggtgggaagatagcgcttggatctatcaaaagctggaaaggcacgatcatactaatgaaaggaggtcagcattttcctagtcatagcactctgagccctgatgtgtgactctaagtgactgagacttaggtgtttttcaactctgcagatgtcctaatttccttggagggacacttttaatgcacaggaataggcattctgaaacaaaggagttaaacaatagaaaaaaagatatcttgttacctacttttagctatagtaattctgcagaattctaattaacctttagcagtgtaatgctttttaaagcataatgttatttcaaagtgaagtacaggcaacaagaattttaagtcactcataactcatgctttctaactattgtctccagaaaccaaaatctgaaatgttgctttattcttgctctttatttggattaaacataaaaataattttgagaacattgtaaagaaggaataaaatttcatttactgcactacattgcttcatactgtttataaaagcaagtcattatttttcaactttatctacttgaatgaaattatagaagcacaccacaacttttatcatcttgttatataaggagttgatcttatgccagatgaagtaaaactaaagctaaatattaccacgtttgctctgcaacttaatgaaaatacaggcatacatagctttattgtacagtagtgcttacagatagtatttaaaaaaaaaaaacaaaaaggtttctggtaaccctgcatcgaacaagtctattggtgccatttttccaacagtgaacacaggttcacttcatgtctgtgtcacattttggtaattatttaaatattcaaacattaaaaattattatatctgtttggtgatctgtgatcagtggcctttgatgttactattttaattgttttggagtgtcatgaaacatgcccataaagacagcaaactaaatcaataaatgttgtgtgtgttctgtctgccccccaaactggccactccaccccctcaactcccaggctccctatcccttgagagacaacaatattgaaagtgggccagtaaataaccctacagtggcctcttaagtattcaagtgaaaggaagagtcacaggtctctcactttaaagcaaaagctagaaataattaagcttagtgggcaaggcatattgaaagccaagattcttgtgccagttagccaagttgtgaatgcaaagaaaagctcttgaaggagattaaaagtgctactccagtgagcacacaaatgataaagcaaaacagccttattgctgatacggagaaaacttttagttgtctggatggaagatcaaaccaaccacaacattctcttaggccaaagcctaatcaagaacaaggcccacaactgtcttcaattctatgaaggatgagagaggtgaagaagctgcagaagaaaaaaaagttgggagaggttgatttcatgaggtttaagggaagaagccatctccataacacagaagtgcaaggtgaagcagcaagtgctgatgtagaagctgcaataagttatccagaagatctagataagactcctgatgaaggtggctacactaaataacagattttcagtggagatgaaacagacttatttggaagaaaatgccatctaggactttcatcactagagagaagtcctgccttcaaagcttcaaagaacaagctgactctcttgttaggggctaatgcagctggcgactttgtttttgaagccaagactgaccattgtaaaagtcctagggcgcttaagaattattctaaatctactgtgcccatgctctataaatggaacaaaactgggatgacagcacatctcttaacagcatggtttactgaatattttaaacccactgttgagacctactgctcagaaaagactcatttcaaaatattactgctcactaacaaagcacctagtcacccaagagctctgaaggacaggtacagggagattactgttgttttcatgcctgctaacacaacatccattctgcagcctgtggatcaactttcaagtcttattatttcagcctcttattatttcaaaatatatttcaaatatattttgtagggctattcactgccatagatagcgattcctctaatggatctgggcaaagtaaactgcaaaccttctaaaaaggattcaccattccagatgccattaagaacatctgtgatccatgggagatcaaaacatcagcaataacgggagtttggaagacaatgattccaactctcatgggtgactttgaggagttcaagacttcagtaaaggatgtcacagcagatgtggtggaaataacaagagaactagaattagaagtggagcctaaagacatgactgaactgctaccatctcatgatcaaacttgaatggatgaggagttacctcttatggatgagcaaagaaagtggtttcttgcaatggaatctactcttggtgaagatgctatgaacactgttgaaatgacaacaaaggatttaggatatcacataaactcgatgaagcagtggctagatttgcgaagactgactccaattttgaaagctgttctactgtgagcaaaatgctatcaaacagcatcacatgctacagagacatctttttgtgaaaggaagagtcaatcgatgcagcaaacttcattattgtcttattttaggaaattgccacagccaccacaaacctcagcagccaccacctggattagcctgcagcagtgaacatcaaggcaagattctccacgagcaaaaagattaggacttgctgaagactcagatgatcattagcatttttagtaataaaatattttactaataaaagtaaagtatatacatggctttttttttttttagacataatgctattgcacatgtaacagactagagtatagtgtaaatacaaacttttttttttttttgagacagagtcttgctcttgttgcccaggctggagtgcgatctcggctcactgcaacctctgcctcctgggatcaagagattctcttgcctcagcctcccgagtagctgggactacaggcacatgccaccatatgcagctaatttttgtatttttagtagagatggcatttcaccatgttggccaggatgctctcgacctcctgaccttgtgatccacctgccttggcctcccaaagtgctgggattacaggcatgagccaccgtgcctggccaacataacttttatatgtactgggaagccaaaaaatttgtgtgacattttgttgcaaaatttgttttattgtggtgttctgaaatttccaaggtatgcctgtacctccctaaaaaattctttcaatttagcctcaaggtagtcaaatgactgatttttctaagctgaaactaacatactagcaatctggaaaggcaatataaaatatagcaaatgaagcaacttctaaaagtgttttactcgtggtttataacaaaatgagaaattgttcataattattccctttactaaacaaatatgctagctcaacatttttatgaaaagcaaatcattaattagctaatatactagtgtgaggtaatcaggaataaatacaagtctggacatatgcctgtgcctttaagaaaatactgtaattttgtaatattcattgcactaattataatacattatcttaactagtccagtagagggagctgattctcctaattgctgccgctgccattagtcactgtcgcattataggcgttagtgtaattgtggggatgggcttatatgacacaggccccaggccccgacaaatgcaaatctgtacattaatcgtcagctttctaccccaccaactcttcaactctttagtggttccccagtttttattaacctcttcagcaacagcctcatcaagagaaaccctgatcttataacaactgatactagattatcttgccaatgaaaaccatgcttcaaaaagctaaatgtctttctacaaaaaaagaactatgggagttaagaatgcaaatccaaatcccaagtcagttttttatttgctacaattatttggagtcaagtaaggcataaataataatttggaggtgtttcttttagagattaatactaggatttatcaactttatgaatattgaaaagacattttctgcttggaaaaaagtaacactcacacacacacacacacaaaacaaaacaaaagaagtgcctgagataactttaagtattattgctatggaaattttcttaccatttttctgtccaccactgaatgtgataaaattgtcgtcttcattaatttaaccctcttactgcacctactgataagatggaaccctaacataatccacgatttgatttatctccatttctaagcttttggtaaaggattttatataactactagagctgaccacaaaggagatgtggctttttgatttactccaattctaacattaggggggaaaagtgatttcatctgaaaaggaagctgctgtcttctttgcacaaaccttttgatgaataacactatcgggaacatcatggggtcctgctcactccatgatcttactcttgcaagagaagttaaatcatgggaggtaggggagggaatgaaaagaaagagctgggggagaaatgaatgggtaaaggaagacagttccggatgtgaatttaagccacataaagtgttctgtaaaaccaagcagtgtatgcatgtgtttgatccttcaaataaacctattgtaaacctattttcccagaaaacacagtggaagtcaaagtggctgctatattgaaattaattccactttaagtcccgagtcatgcacgaactttgctgccttgtagtctgaaagaactatacatacagcctctttcttttcttttttttttttgggatggagtctcgctctgtcgcctaggcacgatctcagctcactgcaacctccacctcctgggttcaagcaagtctcctgcgtcagcctccccagcagctgggactacaggtgtttgccaccacacccagctaatcttttttgtatttttagtagagatggggtttcaccatattggccaggctggtctcgaatttctgacctcgtgatccacccgccttggcctcccaaagtgctgggattacaggcttgagccactgcgctcagcctagcctatttattttcttcatgttttcatggtaatcctataggcaagcattgtatttttatcttttccttaatttgatttctagcacaggatgaaccagagttaataggtcatttggcaagacaaacagtagtggaaagaggtaaattattttacgtaccaatttttgatgatgaacttcatatcctgagtcatgtcggaattctgcatccatcttcacttcagagatctcctccgtcttgatatttgtcaacccagaacctgtattacatcataattaaagtatgcaggacaaccaattagttttactcataaataataacactgtaagacaaagcctacccaaaacttctttctaggcctgaagttagaagaaaattgataaatgactcttaaagaaaaatgataccctatatttaaaacttcaattactacctattttgaacaaaaagaaatgaaagggtaagggaaacctgaaagtaaggcttctgctgcctttaaatacatgctataatttttgaaaatgggggaaaagcagaagttaaatcctggttgagaggttggcaaggatttgttcctggaatatgttggcttggcttacgggcttattgtttagcctattatgtgtctttttccatgtgcactcattacttcagaaataataataaaaggctttaaaaatgagcattaattacctggtagaacaaaactgctactttggggctttgttccaattacaaataaattatgttcatgtatctatgcagtgaagcgttgtaaaaattatataattttagtcaagtgttctagttacacagattgtaattggttcgtctgctgaataaagagctatagtacataattttaaaaatgcttcttagcaactaacagaatttataacctacgaactcttccttttctataaattgctatatgattcttaacactaattgttctgatgaatttcattattcaaataataatttgaagcttaaaacaaaatgcagagtcatttaaaaaccaaaaacataagtaaaaaatgtaaatgtcagtgtccatgctataacatttaattatcaaacatcagaattttaggatgaaaagggcttttgaagtcatcttctctaccgtgttcccacccaggggcagattgtcagttcctgtttgaacatagaggaatgtatcaatttccctccattttttgatagatttgcctgcccaaactgtcctttttttacatgaagccagaatcagcttccctgtaacttccatcctttgagcctgattcaacacagagcaagcctaatcctcccttccacattaaaaccttgaacaggtatcacgaccctaaggagaggcatgttcctgctggttcttgtcttacttgggctacacattcccaattcctttggctcccaggggaattcacttcctgctcttggcctaatcactctttcaatcttgtctacgagattctgggaaacttgtgacacatcttgctgacactgaaaagcacaatgtccacagcatatgatgtgccagtctaagagcacagcctatacaaggagaaggtaaggataatctgacaaaacctaggaaatccacgctggttgtgacctagcaccatttcctcatccaattgttcaaaaagcttccacttgataacctatttgaaaagagacccacaatcaatgtcactctatacctggcttacagattgtgaagctatcttctctcctttttgctattcagaacttcattttcctatccctaccttcccagctttccacaaagaccacaggcaatggtgctacttccccttcaagttctcttagcctgcagttggtctgggtcataagaacttggacttgggtagcaagatgtcatagtttaaaatatatccacaaatttgctgatactccttccttcaagagggagaacttgattcccttccttcgaatgtggtcgggatgtagtgacttgctctagtgaacagagcatgatagaagtgatggtgtatgacttctgagactgggccaaaaaaggcactaaaacttccttaatctctttcctggacctcttggtgcaggggtgcgagatgccatgttgtagggacgctcaagcagcattacagagttcacatggtaagatactgaggtctcttagtaacagtgacgtgagtgagccacgttggaaacagacccaccaggtccaatcaaaccttcagatgactttagctcaggcagtgtcttaactgcaaccacatgacggacactgtgccagaaccatccagctaaaccacatcccaaatcctgacctataaaaactgtaagaaactaatgcttgttgttttaagctgctaaattctcgcgttatttgctacgtagcaataggtaactaatgggctagggctttcttttctcatgttgatctatctcgggctttaatttcctttcatcagaagttcattctctttaatatagacataaaaggcacaatggaagtgggacagtttccctttctcattctttaactctggtcctctcaatgacctaaccctcaacccccaacttcttgctacgagacccacagagttctctattcttatttattttcttactttaatattgttaagtattttttggttaagtttcaactcattctgctgaaacgaacctttctgacacttatttttatagggtagtgatgctaaaactctcttaattctcactggctgtatattttaatctttctatagcccttttaaatctgagatccttatataaccagtgatttctttagagctcactccttttctgttattaagatctggcaacgtgccaagcacggtggctcacgcctgtaatcccagcactttgggaggccaagctgggtggatcacttgaggtcaggagtttgagaccagcctggtcaacatggtgaaaccctgtctctactaaaaatacaaaaaaaaaaaaaaaaaaaaaaaaaaaaaaattagccaggtgtggtggcgggtgcctgtaatcccagctactccagaaggctgaggcataagaatcgcttgaacccggcaggtggaggttgcagtgagctgagattgtgccactgcactccagcctgggtgacagaatgagactctgtctccaaaaataaataaataaataaaagatctagcaacacaataggttagaactatatttctgagatttttaagaaaactttcttgaacagtttgaagagtcttcccttttagattttggagccaaatatttatactgaaaaataaaagtaaagaatgagctctggccgggcacagtggctcacacctgtaatcccagcactttgggaggccgaggcgggaggatcacgaggtcaagagatcaagaccatggtgaaaccccgtctctactaaaaatacaaaaaattagccggacgtggtggcaggcacctgtagtcccagctactagaggcttaggcaggagaatggtgtgaacccaggaggcagagcttgcagtgagccgagattcgtgccactgcactccagcctgggcgacagagtgagactccatctcaaaaaaaaaaaaaaaaagaatgagctctcggccaggtgcagtgactcatgcctgtaatcccagcctttgggaggctgaggcgggcaaacagtttgaactcaggagttcgagaccagcctagccaatatggcaaaactctgtctctactaaaaatacaaaaatgagccaggtgtggtggcacatccctgtaatcccagctgcatgggaaacttaggtgggaggatagctttagcccaggaaatgggggttgcagtgagctggtatcatgccactgttctccagcctggaaacagagacaaatcctgttttaaaaaaaaaaaaaaaaaaaaaacaaaaccaagagctctccactaaaaactttacaagcccacactacttttgaaatgatactgtgaatacttttggtggtccaaaaaaaaaaattcatattatcaagtcagcatgacagataaattcatgtttacagctcaatagtttgagaagctcttggcagaagagctcttgctataatagttcatgtttgtttagcatgaatagtcatctagggaagactttttacattaagcaaatcttactaaaagacaaaatcagtaagctggcacatagggaaatattcataataaggtgataatgcatgtaataaaatgtgatgagtagtttcaaataaatggcagggaccttggtttgcaggcttacttagaggtctttcttgagttgtgctgatttcaccctaagccctggtgactccagctctctcttcctgtaagtcatgatgagtggacagagccttttgttcatgtgggggctaagggaggtatgtccttcatgacacctcttgcatggctcgggtcaaggacctggtttccctttatttggactgcagaagggtggtgatgaattgtaacagaaagggtagctttctaccctatgtgaagagctcgctaatgtgtttttcttttttattctggtcaaactgtataattagtccttcagagtctattttttctttggaagtaagccaggaggaggagctataatggccactatgcccccaaatcaccactgttattacaatggtccctacttgacactgcatgctggaagctaccatattctgtttttttagatatgagagttaaggagaagccattttcctcagtcatgattataaagcactgggtgggggaaaaacaaaaacctttttttaacttgtttctgaggacaacagtgattattcaaaaacaatgccatcacttgaacggcatgacaatcttgggaaggctttctaagtttggaaaggctaaagatataattcggcacattagactcaagtgggtggtctctaaaatgtgaagaagaaccaaagctatgctacaaaacacggggaaattagcccaaatgtttgataaacttactacaagcacaaaaacagaacacacgcatggcttaatacatgtgcagtaaatactgctattcatagacaaaccttaactagaatcttcctcacttcatatctgagcattctttctcaactttagccatcttactgggcaacccaagcctacgctgtgtatgaaaggaagcttggcttaggccaccctctcttctgaatagaattgttcccttcttctttgccaatccaggtgcctcaaatctttcataacctctctggaagcccatctccagtaagttctctacttaacatgcccctgggttagtactccatctcctcccatcacagaacattcttgttagcacttaatgttgctttgtatttccttgtcttccaaattccatctcatgtttccaaatatgcaaaattccttctattatacctcaagctcctgagagcagggaccctaccgtttaatttctttcaaacctagaaagaatttagtggattgatctttgtgaaatccccaagtgacatcatattcttactgttatgagaaaggttttggatggttttctcccaccagtgtaataccattaactattctctagctcttcctttaaaacacactgtttttgtttgacagcgtttggaggtgtcctttttgttagatttagattaaaaaaaattttttttaaaagaataggccgggcatggtgcttatgcctgtaatcccagcactttgggatgccgaggtgggtggatcacctgaggtcagtagttcgagaccagcctggccaacatggtgaaatcccgtctctactgaaaatacaaaaaaattagctgggcatggtggggcgcatctgtagtcccagctacttgagaggctggggcacaagaattgcttgaacccccgaggcagaggttgcagtgagttgagatcgtgccactccactccagcctgggggacacagcgagactccatctcaaaaaaaaaaaaaaaaaatcaaaaaacaatttttttaaaaaagaaaaaaacattgactggtagtgtcacctggtcctggatgtttcaatagtaacatataggctctcctggcccaatgtagaaatttgataaaattgaatgagtcgaatgagcgctttctaagttacattttatgcttgtagatgaagagcatgtcttttaaagagaagcaccatgaaaaaagtcccaaggcaaatgaccaacctgagctggctgtggttgcaattagaactgaactgaccctcagcccgaggccttacaagttggctgagcagaacaggaatgtcaactcctggctccttgagattcccttacatgacattgacaataaggaggacattagaagaactgaaactgtctctgactcactataatttaagttccccttaaaagcctacagacagaaattcataaatcaacgagaccagctgtcaagacgtgtcacactactgtctctgctgccactgttaatcacagcataaaggcatgaagatgccacaggcagactctcagtcttcatcagtgaccgtgcttggaggcagtcatggctcgagcctgtggtggaagtgtgagggacagggtgggtctcctggtctgctgctgactgtatctgaaccaggcagcaaaggttgacctctgtgtattaatatcttcaaagaaagttaattccctgttctttgactatcgcctggggacattatgaggataaagaagaaaataaatatggaaaagtatgtgttatttgggattaaaatctccctggaatacacaaatttgtcaattcaataactttcttcctctttttgattcactgaaagcactggctactatcagttgggtgaggttgttcatagagtagacaccaggcacatatatgcttctgctgtgctatgacattattcataaaataaaaatgtgtttcttcttaatgtttgtgaaactgtaaaaaaagaagtgtctatttcagtgttaatgggatttttaagtaatacataaaaaaagggcttatgtgcaaaattatgcatccacatctgttgtgttactttagccactcattgagaataagtacatacaacccacaaaacagaagatgtattttgggctctggaaagaaaccaattctggtattttcaggaaatcatgtctacttcagtaactgattgaagtttgagcccagttcagttagaaaattacccatctggacaccaaacaagaaaggagagatgttcacactggtatccaagtcatcacctgagagtctacatctatctgggcttctgtttttaaggacaggctgtatataatcgtctctgtttttgttttgttttgtttgttttaaagaaaaaagaaaaaaaaaaacccaaatttggaagggctctcttttaggtttcaaagggaaagctcagaaacaaaaaaaatcatttcactcggaacttgggaaatgaagagtaaggaatagtcaaggggaatttttaaaagtttggtttctaaggtcacttcaaattctactctgcagtaagtacaattgagagaggcttaaaatgcagaaaggagacaacgtctgctcgagcttaggcccaagatgcggagaggcacaagtcaagcggttctgatacctggtcgagtggtcagtcctcggtcggcagcagggcgggcatcaacaggctcaactgggcacaggaagcaagggacacagaaagcaaacaagacaaatcaagatggtaagtcgtggctcccaaacatagtcgagcagggaaaaaagcatatgcaataaacaagttacaaaaaaggagcagccagaaaagaaccacagtgagttaatcccgagcatcgaggaccaggaggggcaccactttaaatggcttatcgctattgatgtgccagtcctgctccttagttttctaataaaagccctcaccaggatacgcagcaacatcaaagaagaggggtggggagggtggatttccctctgagctagtttagagatagtttcttggcttttgattagaaataaaatattcccagcctagcagaaaaccttaaagatacttccttttacaactgcccaatcttatcttattttacagttaattaactacaaaaggactctgttaaatttccaggggaagtgcaaatatgaatttatcaggagagcaaagttttactatataatctgccatttagtgagtgaatcaaatttgtccttagtatgagggcagaagagggaaaccgcagtctttttctcactttttcaaaaaggctggcttccatttgacagatgacatacagctgaaacgtgtgaaatgaggatatttcattttatatttgccattgttcacaattttccctttttatgtgttctgggtccgacccaaagaaagcagtgtggacagcatgatattcctcaccatcatctgacctttccaaagcacttctgatgctcagaaaatacttccttgttttacgctggcgtttgaagaaacaaggaatggggacaaaagtgaagtttttaggattaataatggtcatagggtaaatgaagccacggaggtaggtgcagggggaagctgctttggtaaggtggcaagtgtaaagggaaaaaggtaagacaaagtgagcacaggtgctgaaggagacacggtgtgctcgatgaaatggcttctaacaatttcagcaaaaccatccagcttactgatgcacacaggccaggcattcaaaggtgggattctcagtccaaatcgattttggatgccacatgttaatagaaacagtgagggagaaaaaaagtggcagtaagccaagtctccaaaatataagaaaatatttccgggagcactaggatatttggatgaaataaaaatttggtcctttctcatgtagagactggcagcatggtggagtcaaaaggagggtgaggcatctaatcccaggcctgggcccaacatttacaatgtctgtggccttgggatgcgccacttctgtggctgtttctccatatggaaacagaaatgttaacatctgcatcttctaattatggtgaggaacaaataagtaacctttaaagcctgtttgagaccctaccagatactacagaactgcactgattaaatatcctatgattaaatattccatagtaactactgatgcgagagtgactattctctagtatttcactagtgcattagaggaagacatagttcacttccttctgcaactcccaaatacatttcgacaatgaggtttggtttttctatacttcattttttttcctatttgcagcaacctgtaatgagtaactgtattactccttgtaaaatgcagttagttgaaaggtcattgtactttgtgagaatttcctgatgatgagggacccaatagtgcttcaactgcagttaagaacacaacagaccacatgcacgagggcaaacgcgtaccttgaagtggtggtgagcacatacatcaatagttacgttattagaaaatgtatatgcaactcggggcagtaagttaagtgtacctgtggtttaaatgcaggctgaggagctggtagtcccacgggccactgctaatgtcaccacttactttctctgtgatctggggctaatcacattctttctgaacttcagttgtgtcacaaagtaaatggtttttccagggttcaaatgcgtatacttatgtgaaagaaacttacaaatgatattgtcctataagtttctctgcctctccccgctcttcttcttcttcttctatttttttaaataggcatgtattatttaaaaacaataataaaaccctaaccctattttttaggaagattaaacaaaactagtttcagtgacataaaccctaatctgctttaaaagattgaagctgatttagtataaattaatgctcaaaaaataagtagctcagggagcagacattaaaagttttttaaaaggcaattatgatatcattgccgaaaaaaaagaatacacaccaacaaaacaaagtagtgtgttatttcccaatccactgcaaatactttccaatttttccaattgacctttacttaaccagacagtaacttcatcaatgaagtgctaaaaaacatcttacattggctgtttagtaatttaaaaacaagaaatacattatcttagctttaacttttaatagagttaaaataaaatgtaagcagaaatgagttattctcttgctctcagtagctttgaatcaaatcctttgctgtaagaggagagaaacagaatggtcagacctctgggatttttgagtctgttacttctggtattctttgtaataaacctcaactattaaccgtgctgccttgtacaaactctctaccaggccaaaggtaatgaggaatcagcagtacaccagttttacatatagataagaggctgacaagaactggtttgtaagtttaatgaaatatttatttaatctaaatttcaacatttaaattggcttcctcattgcctctataaagctagttaaaaatatactagaaggcagcttcacattttgcaaatacatccatacaagtcttataagacctgctttgtctctttaaaaatattattttatctacatattatatctaggtattatctacaaagaggcagactgttggccacaaagacttgctggcagtcactgcatgctatgctgctctttgtggctgcccttctcaggcagtcaggaaaaagtagaacaaacacaaatgtcatcaacgctaatgcttccagccagatcatttcacgatctgtgagcacaattctgtaacaacagcttcatttcagcctagccattcatttaggttttgtggatgtgaaaaccaaagaataaaaaattgttaaggcaaatcacagcacattggaaaactctgatatgcttattttcttcaatgtaaatttaaaaaatgggcatcagaacctcctctggatttcactgattgttcttaagaaaaacaacaaatttttggtaagcatttgaaactatgataatgaggactgcatgaagaacaaaaggaaatcctttgagaattttagatattttcagtagttgggtgtatgtgtgtgtgtgtgcacatgtctgtacaaagaaagactaacaagtttctggggagaggtgggagacggtgttagaagagagacggctttaggactgtatctcattatatggcttattatattcattattttaaggatacattgttgaggccataaggtgattcatcttgagacaggctgataaagtctctctaataagatcctggctccattaaaaaaaaaaaaagctaccactgacatttactacgttccaggaattttgctaagagcttttttatgccttcttatttaatgctcatactatacctctgagttaggaattattgtcaaccttattttacagacgaggaagcagccagagaggctaagtaacttgctcagaagcacatagcagggctggaatttaaactcgggtctgtatcattcaggagttcaggggtatggggtagtatttaatatcctatgagatgatggccgtctattttatttaaaaaccaattggggccgggcgccgtggctcatgcctgtaatcccagcactttgggaggctgaggcgggcggatcacgaggtcaggagatcgagaccatcctggctaacacggtgaaaccctatctctagtaaaaatacaaaaaattagccgggcgtggtggcgggtacctatagtcccagctactcgggaggctgaagcaagaaaatggcatgaacctgggaggcagagtttgcagtgagctgagatcgcgccactgcactccagccagcctgggcgacagagcgagactccgtctcaaaaaaaaaaaaaaaaaaaaaaattgcttaagtggctttttaaattgtttgctataatcaatatatatatgtcaatgttgggactgataatgaagagtactgcaactcaagactctgacactgcaagttctattgcctcccaaaattgttataccagattctactgttcaaacagaatcatccaacaagaatatcagctcttttcatgagacctaggcaatgtaatagctgcgtgtttgtcaagtatccagaagtacttaatcaagggctttgctcaaatggacatcctggcaattaccaagggttcacagtgtatgtgtgtgtgtgtacattcacacgtgtgcacgcagattttctcctaaggctgatgcaacaaggtatgctgttagtaaaagagcaaatttagcgtgcattcaatttacaaaatgagatcggacatttttcactaaaaattctcattagagactgaatgaagaggaccttcaatgaccaaaatctatctacctgtaaagaaacaaaacaatctgcactcaatacatttaacaggacagttttccaggtctttgataatgaactgtccctaaaattgttttcttctatgtgattaagaattattttcataaatggtaaagttttaattatttttacattgtcagtaacatgctgtttgctattactgtaaggtgccctttttcaaattaaggaaacaaatttggggtgatgattcacattgtgaaaatagtctatatattttctgcaatggttctttagaaaaaacttgtccagtacacttaaggtctaatattatatttagatttagtactaattgcatgttataaggtatatatattttttactttatttatttattttttttaaatttaaagtctcgctctgtcacccaggctggagtgcagtggtgtgatctcagctcactggccacgtccgcctcccgggttcatgccattctcctgcctcagcctcccgagtagctgggactacaggtgcccgccaccacgcccggctaacttttttttgtatttttagtacagacggggtttcaccatgttagccaggatggtctcgatctcctgaccttgcgatctgcccacctcagcctccctaagtcctgcgattacaggcgtgacccacgatgcctggcctataaggtatattataaatatgaaatctccatcaacatttgctgctttgataaagaaaatcaggtaaagtgctgttgtgttcttaaaaaacatgttatttgtatctagaaatcaaggtgtttgtgtgtaattgtatacttctgaacatgtagaaaaagataaaagaagctgaaagatattcttgcctgaacaggtgtttctgctaagaaatccctgtgaaaaaggatgccatctactgctcaaatttgttgatagagaagaatcttacttctctgaggtaccaaaggaaaaaacatttagagcaatgtgctccttaattttggcagctgccttaaatttaattttctaaacacaaattaagtcttaagcaaaattaaattttatttatatgtagttctctatctttgcctttaacatttaattcaatctgaaatttcatgtaagaataagtagccagtgaagactactttggtgcctgtcaaatctgcatctctgcaggccctcaaaactcctctctgttggtaaactgtaatttttccttatttcactatctatctgcttttttggaaggtggcattctaggtcattacgtcataaacacaagttgaattttgtgcttccattccagagggaacaatatacctcacagttaaaaaacatttctaaaaaattcctaccaaaagtcatcacttaagaacttagtctcctggtgcctccatttcctcatttgaaaaagtcataaacataataatatgatatacagtacatgctctttatgtatccacttttgttatataatgtaccattttatattaagaagaggaactggaaaataaaaattagaagaatgttattgccacacattttccttgtgaagaactgcctcttcaataatacactgtggctccccttcgtccgggagtgttcactcgaaggataatattccctagaatgcaaacctggacatgtgcgaaacaagaggccctttacctgcaaatgttatgtaaatcattaccattttgttttgccacctatacaatggagttgttgtcttttccaacaattggcagtttacatgctttgcagcataaaaaatataaagaataatttacacagatatattattttaatgacatagtaactcctagtatttactttttaaagtaaaattataatgaaaatatttatgactacatcaaaaaaaattcaccactcaagaacatacaaaagataactctctctcttgcacacacgttatgtatgtgtatatatacctcccagaacgcccttgctggctcaggggactcttaccttcgttttctgtgttggctggcacagagtcagccccaaaagaatgccacggctggagatcgtccaggctgaactctccattcacgggaaggagctccacggtggttttcgtttcggtcaaagatggcatgagagcatcgtttccgtaactgatccttggttcactaatcatgttggccaagacgtcatctgaatagttttgctctttctgaagcagctcatctaaaccaaacaaaaccatctctttggtgagtaacaacaatcacaacagcagcagcagcagcagccaccatttacttctgccaggcaagacttcaactgctttcacgtgcatgatcgcgtttagagccatgacataggtaccattatcatctcccttttacagatgtgaaaactgaggcacatggcattcaagctacttatgcaaagtcgcagctcacaagagctgctggcaggactgcaggcaggagcatggcagccggccaatgtgctgcagcgtggcactgctagaggtgaaaggccacaggggctcagctgccatttcctcctgacacagttagacgtccctagtatacaatgatcgcacaggaataaacgccaggctttggtgtggcggcagtaagtgaggcacaatctcattcaagctgaaagacaacagacaatctcctgtcttgccttgcacacttgcaaggataagaaaagcattaaagggccagtagtttgctaccttcttgaatagttttcactgtcttgccttgaaaaaaaatctgcatttcctaaatgctcctcttgtgctgcatgacctatgctctgaggcaacaaggaaactgttcccttgcccttccagatgtagccctgcagacagacatccagccttctctggacttaaccacccctggctccccgtatttcccaatgtgagcagacaccaaatatcctgcctttctcctctgttgcttccctttccaaagaatgctgtcagtgccgcctacccccccactttaaaaattgattaaacaagaatcagctttatggaacatcattgacttatcttttcttactggaaaaagagagcttagaatataatcttgtatcatgtgtaattactgctttaaaaactgaccccaggatatgaagatttgtgagtcttctcttatgtcaccaaagattcaccatgtttttctctgatttttacaaattagagaccgacagacagcactgcactattaacaataatatttgattaaccaaaatgtctcattttccaatcatagctgtgtcaagagtttgctgtagtatatatttcagacacatcactggttagttttattgctagagaaaatgaaaataagatcaggatttaaatttgatttgtaacattttacaatcatctttcaaattctcttttctattgacaaaaaatgtatctgaaaaattaaaattctgttcaaatatacccattaaaataatttgatggaatagcattaaagcttgtgattaatatcttttcatgtagtcagttttattgcaagtgattttaaatgatggaagtcccaagcaaattagtccttttgaagtctaatctgagttataatatatccctattcactgtggcaccgtttctaaaattcaatacttgatgcccatgatgacctttcccttacagataaaagaccctcattagatttcctccaactttttcatgttttacaaagccataggtagcggctaataacttagccaatgtctgattaaataaattaaatgagcatttcttttatataaatcttttgcttgtgactgttaagcacttactatgctaaagagaggatattctggaatactaataattattggtgcatacacattcatcttgacaggaaataacctttgccagcgagaaagctcttgaactccccaggggctacgctgttcttgggtctgtggtatctactatcacttaccatgtcctttatttggaaatgttctcactgtttcgcatacacagtacttatcttcttccctgtgacatctctgaataactctttttactctttttttctcctctcttcatccctgtcattttcttcttgtatctctttccatctctttctacaattctcccctttggaaatcccatcgactcttgaaactctaaagatctcctacctttgggtgaatctgaaatgtacttccccagctttgacttctccctcccactcaaatttgtatatttccaacagtttgctggagataccaacttagggctccctcctgatccatgcacttggtaggtacacaactgtactcaaggtccctggctttcccttccacctttcctgttttctaatcatggcagaaccattctccctcccagtcacaggcttgaatccttcagagccatccaggactccctgtatttcttcgtgtccagtactcacactaccgacaaatccttttgcattctatttctgaattctctcagccatttcctgcttgcttttccacaccaccctcaccgcccctaggaatatgattacttttcgcctggataattacgatagtctcctcactgcttgctatggtctgaatgtcccccaaagtcatgtgttgaaacttaaatctccactgtggtagtagtgagagatggggtcttctggaaatcaagtcatgacagttccaccccgtgcccccgaatggactactgccttctaaaagggctagaggaaaccagcacaggcccctttatgtgcatctgccatgtgagaacagtttttgctgcctctggaggatgcagccacaaggcgccttttttttttttttttttttttgagacggagtcttgctctgtcgcccaggctggagtgcagtggcgcaatctcggctcactgcaagctccgcctcccgggttgacgccattctcctgcctcagcctcccgagtagctgggactacaggcgcccgccaccacgcccggctaattttttgtagttttagtagagacggggtttcaccgtgttagccaggatggtctccatctcctgacttcgtgatccgcccgcctcggcttcccaaagtgctgggattacaggcgtgagccactgcacccggcttgatcctgggcttctcagcctccagaattgtagtatttctattgtttgtttataaattacccagtctctggtatcatgataacagcacaaaccgactgagacaatggtctccctgctggtttttattttacgtttggttcctgaaatcttagttcctgacacacaagaatggctccctctttgtttcagtgggtcttcattttctaccgaattaattccaactcctttgccagatgctgaaggccctctgtggtctgggcccaccccgtatttctagccatggaactcacagctccagctgtctacaccacacctctctctcaggctaaatagcttggggtattcccacaaaagaccatgcatacccattctgacacttttgttttctattcctgctatcttggaagcccatctctgctcatctacgttatttgaactctttagagcccagctcaaatgccctctcctgtatgactctcctctcccaaggcaggcattattaatctgatgggacaaggagactgaggctgggagaaaggaaccaatctcttcaagacccaatggccagtaagcaccagtgctgaaatccaagtcctgggcttcataacaccagccttcccatgttcagcccctatctatttcagcctctcgtattatcacaaaagtagctgtagaaattaggcattattaagcatgtctgttccaatatctttagcagtctcttccacccttgtggatttgtaagctgacttaatcaccgttagtcctatggaatggttattgcttttggtcatcaaataagcatttctcaggcaggggcagctggaaagggccctgtgcccatcttagcccttggcagtaaaaaggcagaggagcaaaagatcacagtgagaaatcttacacttgtacttcacagaacagtcaggggaggttgaggtacgctgtagtacccttttctcttttctctgttacactgttggtagaaaagttcctccaaatggccaccagcatgctgagccccatggtggttaattatattcattttcagaaaatgtaagtgaaaaagtgacagattcaagaaaaggtacatttttagcagagtgaaacacacttagccttcgttttttttttttggtcgttgttcaaaataggaagaaatccacattcctatcttaattcaacacagaaaatttagaaataaccacccctggctatgtcattcagaacaacgaacctctgcctcctgggttcaagcgattctcctgcctcagtcccgagtactgtgattacaggcacacactaccatgaccggatagtttttatgtttttagtagagacagagtttctccatgttggccaggctggtctcaaactcctgacctcaggcgatctgcctgccttggcctcccaaagtgctgggatgaggcgggagccactgcgcctggccgtcagtgtagttttaagagaaaaaaagaggtagacatgatggattaccattatcagaagtggaattcaatttcgtcatcataaaatgtctaaggcagccagctacctgtagacatgactaagggctcaggattttaccagtggcttacacactggcactgggcaattgagcctatgacaaaatacccagagacaaatatgattctttcattgttcattctgagtgggactttctttgacttccatggtgagactaatcacaccgaaaccacacttccactacattagtggccctgatggattatccttttatctgaattaatttaatacttaattacaacactctgatggcctgcaatggggattttcagaacttttaagcatctatatttgccaaccgctatattaaactaagagactgcttattttcctcccaagacttattttttccccttctaaaagctatttgttatgacccaaaattgtagcgtttatctttgaagtcaaatatcttctataatatccaagcatttgaaccttgtagttaacagtggaaatatttaactgagtttagtggtgataatatttaaaatatggcttcatcaataacagaggtatttaatttcaaataccaaacacctaatgaaccccatcaccttgctcttttacaaatgcttcgaggtggccaggcgtggtggctcacgtctgtaatctagcactttgggaggccgaggtgggtggatcacgaggtcaggagttcaagagcagcctggctaacttggtgaaaccccgtctctactaaaaatacaaaaattagccgtgcatggtggcggacgcctgtaatcccacctacttgggaggctaaggcgggagaattgcttaaacctgggagacagaggttgcagtgagctgagatcatgccactgcactccagcctaggcaaccgagtaagactctgtctccaaaaaaaaaaaaaaaaaaaatgctttgaggatgtatacgaggcatacttagagtaacagagggaagaagccctaccacttagttatcattgtaaacactttaaagaaaacaacatcaaaagataataatttcatcttcaaacagctaaatattttgttttttcttagatattcatgatcattcattttgagaaaaatagccttataaataaaagaactgctgaataggaagcagatgaattcatccaatattcttttaattattaatccactagccaaatgtcttctaagaatttaacggtcacatcttacgattaaagaaaataaaatttatgggcattaaatcaatcagttatgtgttacaagtgtcagttataattactgaacagcttcttccatccactgaacacaagtgggttggagaagaacattttcttcatataaaggaggtgccactcagccttttccctgtaaagtctggctgttaaagctctgatctgaatctatccatctgacaaaggtctaatatccagaatctacaaggaacttaaacaaatttaccagaaaaaaaagaaaaacaaccccatcaaaaagtgggcaaaggatatgaacagacacttctcaaaacaagacatgtatgtggccaacaaacatatgaaaaaaaaaaaaaaagctcatcatcactggtcattagagaaatgcaaatcaaaaccacaatgagataccatctcacaccagttgggatggtgatcattaaaaagtctggcaacaacagatgctggcgaggatgcggagaaataggcacgcttttacactgttggtgagagtgttagttcaaccgttgtggaagacagtgaggagattctgcaaggatatagaactagaaataccatttgacccagcaatcccattactgggaatatacccaaaggattataaatcattctactgtaaagacacatgcacacatatgtttactgtagcactatttacaatagcaaagacttggaaccaaccaaaatgtccatcaacgatagactggataaagaaaatgtggcacatatacaccatggaatactatgcagccataaaaaaggatgagttcgggaggtgggagccaagatggccgaataggaacagctccggtctacagctcccagcgtgagcgacgcagaagacgggtgatttccgcatttccatctgagataccgggttcatctcactagggagtgccagacagtgggcgcaggccagtgggtgcgtgcaccgtgcgcgagccgaagcagggcgaggcattgcctcacctgggaagcgcaaggggtcagggagttccctttctgagtcaaagaaaggggtgacagacgcacctggaaaatcgggtcactcccacccgaatattgcgcttttcagaccggcttaagaaacggcgcaccacgagactatatcccacacctggctcggagggtcctacgcccacggaatcgcgctgattgctagcacagcagtctgagatcaaactgcaaggcggcagcgaggctgggggaggggagcccgccattgcccaggcttgcttaggtaaacaaagcagccgggaagctcgaactgggtggagcccaccacagctcaaggaggcctgcttgcctctgtaggctccacctctgggggcagggcacagacaaacaaaaagacagcagtaacctctgcagacttaaatgtccctgtctgacagctttgaagagagcagtggttctcccagcacgcagctggagatctgagaacggcagactgcctcctcaagtggtccctgacccctgacccccgagcagcctaactgggaggcacccccagcaggggcacactgacacctcacactgcagggtattccaacagacctgcagctgagggtcctgtctgttagaaggaaaactaacaaacagaaaggacatccacaccgaaaacccatctgtacatcaccatcatcaaagaccaaaagtagataaaaccacaaagatggggaaaaaacagaacagaaaaactggaaactctaaaacgcagagtgcctctcctcctccaaagaacgcagttcctcaccagcaacggaacaaagctggatggagaatgattttgacgagctgagagaagaaggcttcagacgatcaaattactctgagctacgggaggacattcaaaccaaaggcaaagaagttgaaaactttgaaaaaaatttagaagaatgtataactagaataaccaatacagagaagtgcttaaaggagctgatggagctgaaaaccaaggctcgagaactacgtgaagaatgcagaagcctcaggagccgatgcgatcaactggaagaaagggtatcagcaatggaagatgaaatgaatgaaatgaagcgagaagggaagtttagagaaaaacgaataaaaagaaatgagcaaagcctccaagaaatatgggactatgtgaaaagaccaaatctacgtctgattggtgtacctgaaagtgatgcggagaatggaaccaagttggaaaacactctgcaggatattatccaggagaacttccccaatctagcaaggcaggccaacgttcagattcaggaaatacagagaacgccacaaagatactcctcgagaagagcaactccaagacacgtaattgtcagattcaccaaagttgaaatgaaggaaaaaatgttaagggcagccagagagaaaggtcgggttaccctcaaagggaagcccatcagactaacagcggatctctcggcagaaaccctacaagccagaagagagtgggggccaatattcaacattcttaaagaaaagaattttcaacccagaatttcatatccagccaaactaagcttcataagtgaaggagaaataaaatactttacagacaagcaaatgctgagagattttgtcaccaccaggcctgccctaaaagagctcctgaaggaagcactaaacatgcaaaggaacaaccggtaccagccgctgcaaaatcatgccaaaatgtaaagaccatcaagactaggaagaaactgcatcaactaatgagcaaaatcaccagctaacatcataatgacaggatcaaattcacacataacagtattaactttaaatgtaaatggactaaattctgcaattaaaagacacagactggcaagttggataaagagtcaagacccatcagtgtgctgtattcaggaaacccatctcatgtgcagagacacacacaggctcaaaataaaaggatggaggaagatctaccaagcaaatggaaaacaaaaaaaggcaggggttgcaatcctagtctctgataaaacagacgttaaaccaacaaagatcaaaagagacaaagaaggccattacataatggtaaagggatcaattcaacaagaggagctaactatcctaaacatatatgcacccaatacaggagcacccagattcataaagcaagtcctgagtgacctacaaagagacttagactcccacacattaataatgggagactttaacaccccactgtcaacattagacagatcaacgagacagaaagtcaacaaggatacccaggaattgaactcagctctgcaccaagcggacctaatagacatctacagaactctccaccccaaatcaacagaatatacatttttttcagcaccacaccacacctattccaaaattgaccacatagttggaagtaaaactctcctcagcaaatgtaaaagaacagaaattataacaaactatctctccgaccacagtgcaatcaaactagaactcaggattaataatctcactcaaagccgctcaactacatggaaactgaacaacctgctcctgaatgactactgggtacataacgaaatgaaggcagaaataaagatgttctttgaaaccaacgagaacaaagacacaacataccagaatctctgggacgcattcaaagcagtgtgtagagggaaatttatagcactaaatgcccacaagagaaagcaggaaagatccaaaattgacaccctaacatcacaattaaaagaactagaaaagcaagagcaaacacattcaaaagctagcagaaggcaagaaataactaaaatcagagcagaactgaaggaaatagagacacaaaaaacccttcaaaaaaatcaatgaatccaggagctggttttttgaaaggatcaacaaaattgatagaccgctagcaagactaataaagaaaaagaggagaatcaaatagacacgataaaaaatgataaaggggatatcaccaccgatcccacagaaatacaaactaccatcagagaatactacaaaaacctctacacaaataaactagaaaatctagaagaaatggatacattcctcgacacatacactctcccaagactaaaccaggaagaagttgaatctctgaatagaccaataacaggagctgaaattgtggcaataatcaatagtttaccaaccaaaaagagtccaggaccagatggttcacagccgaattctaccagaggtacaaggaggaactggtaccattccttctgaaactattccaatcaatagaaaaagagggaatcctccctaactcattttatgaggccagcatcattctgataccaaagccgggcagagacacaaccaaaaaaagagaattttagaccaatatccttgatgaacattgatgcaaaaatcctcaataaaatactggcaaaccgaatccagcagcacatcaaaaagcttatccaccatgatcaagtgggcttcatccctgggatgcaaggcttggttcaatatacgcaaatcaataaaggtaatccagcatataaacagagccaaagacaaaaaccacatgattatctcaatagatgcagaaaaagcctttgacaaaattcaacaacccttcatgctaaaaactctcaataaattaggtattgatgggacgtatttcaaaataataagagctatctatgacaaacccacagccaatatcatactgaatgggcaaaaactggaagcattccctttgaaaactggcacaagacagggatgccctctctcaccgctcctattcaacatagtgttggaagttctggccagggcaatcaggcaggagaaggaaataaaaggtattcaattaggaaaagaggaagtcaaattgtccctgtttgcagacgacatgattgtttatctagaaaaccccattgtctcagcccaaaatctccttaagctgatacgcaacttcagcaaagtctcaggatacaaaatcaatgtacaaaaatcacaagcattcttatacaccaacaacagacaaacagagagccaaatcatgagtgaactcccattcacaattgcttcaaagagaataaaatacctaggaatccaacttacaagggatgtgaaggacctcttaaaggagaactacaaaccaactgctcaaggaaataaaagaggacacaaacaaatggaagaacattccatgctcatgggtaggaagaatcaatatcgtgaaaatggccatactgcccaaggtaatttacagattcaatgccatccccatcaagctaccaatgactttcttcacagaattggaaaaaactactttaaagttcatatggaaccaaaaaagagcccgcatcgccaagtcaatcctaagccaaaagaacgaagctggaggcatcacactacctgacttcaaactatactacaaggctacagtaaccgaaacagcatggtactggtaccaaaacagagatatagatcaatggaacagaacagagccctcagaaataacgccgcatacctacaactatctgatctttgacaaacctgagaaaaacaagcaatggggaaaggattccctatttaataaatggtgctgggaaaactggctagccatatgtagaaagctgaaactggatcccttccttacaccttatacaaaaatcaattcaagatggattaaagatttaaacgttagacctaaaaccataaaaaccctagaagaaaacctaggcattaccattcaggacataggcgtgggcaaggacttcacgtccaaaacaccaaaagcaatggcaacaaaagccaaaatggacaaatgggatctaattaaactaaagagcttctgcacagcaaaagaaactaccatcagagtgaacaggcaacctacaacatgggagaaaattttcgcaacctactcatctgacaaagggctaatatccagaatctacaatgaactcaaacaaatttacaagaaaaaaacaaacaaccccatcaaaaagtgggcaaaggacatgaacagacacttctcaaaagaagacatttatgcagccaaaaaacacatgaaaaaatgctcaccatcactggccatcagagaaatgcaaatcaaaaccactatgagatatcatctcacaccagttagaatggcgatcattaaaaagtcaggaaacaacaggtgctggagaggatgtggagaaataggaacacttttacactgttggtgggactgtaaactagttcaaccattgtggaagtcagtgtcgcaattcctcagggatctagaactagaaataccatttgacccagccatcccattactgggtatatacccaaaggactataaatcatgctgctataaagacacatgcacacgtatgtttattgcggcattattcacaatagcaaagacttggaaccaacccaaatgtccaacaatgatagactggattaagaaaatgtggcacatatacaccatggaatactatgcagccataaaaaatgatgagttcatgtcctttgtagggacatggatgaaactggaaaccatcattctcagtaaactatcgcaagaacaaaaaaccaaacaccgcatattctcactcataggtgggaattgaacaatggagatcacatggacacaggaaggggaatatcacactctggggactgtggtggggtggggggaggggggagggatagcattgggagatatacctaatgctagatgacgagttagtgggtgcagcgccagcatggcacatgtatacatatgtaactaagctgcacaatgtcacatgtaccctaaaacttaaagtataataaaaaaaaaaaaagatttgaatttgcaaatacaaaaaaaaaaaaaaaaggaaaaaaaaaaaggttgagttcatgtcctttgcagggccatggatgaagctggaggccatcatcctcagcaaactaacataggaccagaaacccaaacactcatgttctcactcataagtgggagctgaacaatgagaacacatggacacagggagggggacatcatacaccagggcctgtccaggggtggggtgaaaggggagggagagcattaggacaaatacctaatgcatgcggagttaaaacctagatgacgggttgatgggtgcagcaaaccaccaaggcacatgtatacctatgtaacaaacctgcatgctcagcacatgtatcccagaacttaaagtaaacaaagaaaaaaaaaaaaagctctgatttggacaccagtgagaatatgaagtccctcggcttgctggattttcttctgtctaggatcgaacctccactgctattactattttctttcctttttgattcttttggatcccatggaaaaatatttatctgcaacttctccacaaaatggaaatttgtttttaatcttatctaacaggagattcgcatatgaccaattcttatcttttaaataaaaatttacttatgtgcctgcctgaaaggactgaagatcatacctctacgctctcttccatgtcctttcttctctctcccctgacacagctgcattggaagtagctgtaaatgggatggactaattttccctacccaggaggcccactgtaaatcaagcggtcacccacttccagctaggcattttgccacaccagggctatgagaaacagatttaattttccaatcagcagttctgtgcatgtctgattcttggctcaacatacaactgctatgctgtttattatacttcatctctccatggcctctgaaactccccaaggctcgggttcgtcatccgcaaaatcgtgggaggctggttccatggttcttgcagtcccttcgctttgaatccttttgtctgtactcttgctacatgggtgttctctgggagtttgttagacatgcagaacctcaggtcccacccagatccagggaatcagaatctgcatgttaatgtgatccccaggtgactctcatgcatgttaccatctgagaagacctaccctccaccacactgaccacagccacgagctgtaccaagacaccaccacacaacagcctcggttatcccttcatgaaagaaaaacaaacataatggctgggcgtggtggctcacgcctgtaaccccagcactttgggaggccgaggtgggtggttcacttgaggtcaggagttcaagaccagcctggccaacatggtgaaacccgtctctactaaaaaaatacaaaaattagccaggcacggtggtgtgtgcctgtaatccccattattcaggaggctgaggcaggagaattgcttgaacccgggaggtggaggctgcagtgagccgagattgtgccaactgcacgccatcctgggcaacagagcaaggctctgtctcacaagccaaaaccaaaaacaaacaacaaacaaaaaaacaattctcaaaaacaaagcaaacaaagcaaggcatgagatgagtgtgagccaagaaacaatactgccaggggaatattgccaaaacaccagagtcatgccttgaagtttcttatcatcagggtcacatttctgaaccagaaagccacaggaaaggaaagactggtcacagacttccttcttccctggaccatttgttacgggaagttctcaggaaacaggtcagtaagtgtagagggcatcacaggacaaacttcattgctgggtttcccagaaaagagcagctctcccctactgaagacacttttagcagacgggccttcactagtgagtaaatatactaaagaagcatggacttacttgtaggtcggtggagcagctgatttgggagagaacccatgagatctttaaggacggtagggatgttctgattagcatatatgctacagccatctgcgatgccaaagccatactgtgatgggactatgccagttatgacaccttcataaccatgagaactgcactcatggccttttcatacccatctgctgatttgataaccacaataatcttccttagtgggatcactactcccactgacagttgaacaaactgacatccatcctgagaagtatacttaaaactagcaagtggcagaactgaaatctgaacccaagtatcccaattcctaatgcaaccttctcactgttccatgaaaagttccattttatagaggacatggctatattacttggattagaaactaatattaaagaagcatatcacgcctgtaatcccagcactttggaatcatgaggtcaggagatcgagagcatcctggctaacatggtgaaaccccatctttactgaaaatacaaaaaaaattagccagatgtggtggtggcactgtagtcccagctactcgggaggctgaggcaggagaatggtgtgaaccccggaggcggagcttgcagtgagccgagatcgcgccactgcactccagtctgggcaacagagtgagactccgtctcaaaaaaaaaaaaaaaaaaaaaaaaaaggaagcataaacccatctatcatcacaagcaccctctttttcatacatttcaaatttttgataggtttgaaaaagaatgaattcgacggtatcttttagaagccaggataaaagagattaaagcagtagtccaaggtcacggagattcctgatggtggagcagggctgaaaagctccctcttctagctaagtgaggcctgcctgtcactttgcttggacagcccattctcaatagcactttcctcccagaacactctcccaagtctttaggtttccctttctcaggatgaatacgatggctacgtgaatggccagaagtttcaccaactctaagtcaaattgtagtgtagcgacctaggcacttcaatggtcaagagagatacagccctgtatgacgcggccacattttccaacttggggaagaatttatacacatattatcacaaagtaaatgctgtaccataaatccagtttttatcttgacctccagaaaattaggtcagttatttttagctacactatcaatcttgaaaatctcccagagttaaaactcagactacatgtctaaatcggggtttatttttgtttaaaaataacagtttcctggccacacatgtttaaatgaagcatgctttgtccccttatggtaacaaactgccctggaagggacacaaacaaagcttcacatcatttgtgaaaatattccttattgctagggacattttcctgaaatatcacttgtctggcttagactgagggtacagaagaagtcccttttcctttaaaacacatttccttttggctttcaaacatcatagatcaaagaacttagacctaccagtggcatcagtcagtaatcaagataaagaccagccaggctccctggcatctaaaagcagattgtagggctcctttttcccgtttacctgtagaacttgtgccaatgtgctgatctgatttccaactacattagggagtcttggtcctgcctgggttgtcaggaacttaaagtagagactaaaaaacaactttatggccaggcgcggtggctcacgcctgtaatcccagcattttgggaggctgaggtgggcggttcacgaggtcaggagatcgacaccatcctggctaacgaggtgaaatcgcgtctctactaaaaatacaaaaattagccgggcatggtgcaggcgcctgtagtcccagctactcaggaggctgaggcaggagaatggtgtgaacctgggaggcggagcttgcagcgagccaagattgtgccactgcactccagcctgggcgacagagcgagactccatctcaaaacaaacaaacaaacaaacaaacaaacaaaaaaaccaagtttatatactacagaaataatctctgaaagatgctgtattaagattacaacacacacacacaaacacacacacacatatcttcttgttttgaggaaacgtacagtgaagtatttaggtgtaaagggccattatgtctgcaacttcctttaaaaatttttaaatatatttttagaacttttctaagtctccaattatactaaaacaaaaagtttagtactgtaggcattgtcagctttaatttatacatatttggatgtcttcctctggttcgatttatagtgaaattacatcatatgcccattaatgtgatacaaactgcatgtcttctacaaacaaaaataaaaatagaagtgaatgtaattttgatgccttttttttttttttaactggagacagagtcttgctctgtcaccaggttggactgcagaggcgtaatctcggctcatggcaacctcggcctcctgagtagctgggattacaggcgcgcatcactacgcccggctagtttttgtatttttagtagagacagggtttcaccatgttggccgggatggtctcgatcttctaaccttgtgatccacccgcctcggcctcccaaagtgctgggattacaggcatgagccactgcacccggcctgatccctcatatcttttaaacataagtcaattatttcatatggtctttaagccaagaaacagctatctcttcactcttcacatgctggaggaaaaactggctgcctggctggttgagagatgtgtactttgatggctgacctgaagacatttcaaggtgattgttacgtgaaattctctcttcaaatctgacttgaagagtctaacctctgcagcatatgttatgacttcactgtgagtcttcttttattaataaaatataatgtttttactaattataagagtaacataaatttcatgccaaaaatgtagaaaaaaggaatgagaattcatttacaattctaacagcagaaataatcaagagtagtggtttttttttaatggttttattcttacagcattattttcgtctctttatcactttactatgcaatttttatgactatgcttaaggagagtaaatttttcgaagttattgaggcaatggagagtctttggaatgaggataattaggcctgaggacacagaggaatcatgaggaagaattctccagtttcattcctttttctgggtacagtttgtttctccttctaagtaagttcctagatatagaatgaattggaaaaaatgaaacgtgaggtttgctacgtctataacagtatcacatttcattttttaaaactgccaatgctttcagtgaggaccagaaagtacagtgagaaaaaaaaattcctcaaatattagttttcatgctcttgcacgcatttttataaaggcaaaagtcattctggtgcctgtatacaatctaaaggcataatctcctggagccttcagtgctggttttggggttttctggagatcaatccacagtgtcccattttttctgctggagctctgaacccactaagagagagcaagaagagatgtaaacctctcctttgcttctgataaagccaagcccttactagtccacatgatgctttctctggggagtgagtcacatacaggagacatggcttgtccagctgcgtgctggactgaatttcagctccaacctgaaccttccaacaggacaagggagggaggagaatgggccgtagcaagacttgcccacagcattgccataacagctgtgcaggctgtgggtacaactctaagagcagcactcattttgtagtttcagtgagtcgtgtccctaaagccgtgtcctgtgtgaccagccccgtctctcaagctcatgagagaagtctatctgaccgggataagaaggatcctggggcgggcccaagcaaatgaatgaattgggaaacagtgccgctcccggcagccagcaaaaactccgccatgctgtgaagaaagtgcattctaattgattcatgttgatacatgctgaattgatggaattttatacttcaaaggatgcaaagaattggttagcaagtctgatgagctcatggtagaaaggatgattttcaacatccatacatagtgaatttcattcaaagagcctaaaaagacttatgcagataattataaggggatcaggcaagtgtgtaatagcacaaattatatatatatatatatgtaaaatcacaacacaggattgggtccttttcccacagacagcacatcatccttgtatatatgatagctcatttgaaatgtttatttatgcagattttaaaaagcacacaaaccctgtaagcacttctgcacagtggcctactcgtgttttctttaacacaaaacttgctttctggtgaacaattctagatatagcaatggttctttctcctctgctttagcttattcacaagcttctttaacttctttaacaacgtgtggggaaaccaagcctggcaacagaaagcacttcacatggggggcttggaaatgaatggaaagcgtctgtcttcaggagagcattcacgatgcacaggagtgagagaagctgaaaagagtcactttaaaagaaataatctgcaaccaagaaaatcaaaccactttatcataaactagtgagcccctccctccctgcctgccttcctttttccaggggagtgctagaaataacttcatcaatttcttttcacttgaagggctcatggttcagaagaaaagatgggcataaaaataattactattacaagtgttatggtagggataccgacagaatgacaaagaaacaagcctgggctttagggatgtgactagtgatattacagtggggccccagggaaagagatcattgtcctagcagatacaagtgcatgtaccgaggcacagaggacaagctgcccaggatctgtgactcttctggctgctgtggtacaagggaagtgaaaagggaagcagcttagccaagaggctttcagtttgtgggatacagagggcagaggaatacactgacctataccatgagtatgcaattagcaaaatcccagcctatgggaattctacgggtcaagtgacctgcgcttcatgaacaggtaaactgtaaaaaaaggatggaggagaagcctggagattataaaagactaaccagacaaagtcagcagtaaaaaatggccaaaagcatagccgataaggatgcacacaagagtgatacagccagaaagatatttcaggaactggcccaaggaaaaacagtgggcattttggtggcggtatttgggatagggcgagatgctatcggggtggaggataaacttctaattcttgacctgagtttaatctacgaaaagagaaaatatgggggagaaaggttctgtttacacatgttgagttgcaatctttcagaatattgggtggagccaatggaaacatggacccagagagctcacttctatgctgaaacagcccacagggaagcatcagaatgaaaatggaaacgttcccaatactagcagaactccacaggcgctttgaaaaaaacatccacattagattccccaaaagggatttatctggtaataaattctgctagacaatgaacagttccacccatgataaaataacatgttgttgctgcaaattctttgtattgtctaattgcagtgcttaacgtaataaaatcaggctggtgttattgttaagaactagagagtgaagcattttttatccaaataaagtgcaatgggttttaaatcaaatcattttagaataagaatcctatgagataataataaaatgcaacttcatcttttcctgccgagaacaaagaagaaaatagtgtaggagatgaaaagtaaagtagacccaacctttttgctaatttgtttttagatacgtactccatgcagacaatggtgaagtgaagtgaagtgaaggggtgtcatcttattcacctagagaaccacaaatcttggtgctggaaagtacgatccattcgacatgatggactatttcccacccggccactcactcgagaatggataacctgttttcccgcctggggtaactgctttccatggatgtacagcttcaggcctcatacgagaggatctcacaacaatctcttcaaactttttctaatccccacactttccagtcttggcacaagacctcatccaggcttctgagtctttgttgaaaatttacacaaaattctagaaatgtattttctttaagatagttactttaaaaatgttattttcatctcagcacagttagcctttccttatctgttcttaaaatgtttcaacttgaaactaaaaaagaaaaaaaaaaacacatttcatctcaaattatgatatactaaataattattgacttggccccaaacatttctactcttttcttcttacacaatcagatttaaaaatgtaactaccttttctaaacatacaatattaaagcatactcaacttcagtaacaggtaatgaatgtacctcaaaagtcagagcctctacgttaagtaccatagtgctccaacatcgttttttacatttttaaaattttattttttattgatacataatagatgtgcatattttcagattatatgagaaaacttaatatattcatataatttggaaagatcaaatcagtataatgggatatccatcacttaaatgtttttcttttctttttgctttgaggaagggtctctctctgtcactcaggctggagtgcagtgatgtgatcatagctcacttgaaccttgaactgctgggctcaagtgatcttctcacctcagcctccagagcagctgggtctacaggcatgcaccatcacacctggctaatttttaaatatttgttttgtagagatggggtctcactatgatgccctggctagtcttgaattgctggggtcaagtgattttcccacctcggccttcccaagtgctgggactataggtgtaagccatcgtgcccagcctgtcttctttacgctagaaactttcaaattaggttctcctagctatttttaaatatacagtagattactgtaaattagtcaccttgctgataattaaatactaggtcttgcttcttctatcaaactgtgtatttgtatccattaatgaacctccctttgtaagtatgatgtaagcaatccttacttggctacactataagcttcaacaacaaattaaaaaatgattcacattatagagcatttatacatgccttttcatcttccaagtgtggtaaacattaattaaccctggctaattaaaacagccacagttgacacatttactcattaatcagcctcaagcaaatgcaaagcattaaactctttcacgttttggtaccaattaaatgttattattttttttttaatgaagaggtcataaatttaagacatgtagttcttagatttaaatttgatagtggttgaaaaaatttgacaatagttcacattcttaaaagtcaaggaaaataaaaacataaccgcattatgggttgaattttcccccaaaatatatgttgaagtcctaatgcctacacctaagaatacagccttacttggaaacagggtctttgcagatataagattgaggtcacaatggagaagggtgggcccttaatcatattagagaagacacagaaacagagacatggggagtaacaccatgtgaagacagaggtggagattggaggggtgcatgtaccaaccaaaggaatatcaagggctggcagcagcactagagcaagcgaaaggcatgaaacagattctcccctagagctgtaagaggcagtgtggccctggcaacaccttgctttaggacttctaacctctagaataatgagataatgagagtatatttctgttggtttcggccatgcggtttgtggtaactggttccagcagccctaggaatctaatacactgcccatgtaagtgaatattagctatttgctgataagacaagaatttctggttataataaatatactggaatagaatgtggtttctttttttttgagatggagtctcgctccagtcaccaggctggaatgcagtagcgtgatctcggctcactgtaacctcttcctcccaggttcaagcaattctcctgcctcagcctcccgagtagctgagactacaggcgcccgcaaccatccccgactaatttttgtatttttagttgagacggggtttcaccatattggccaggctggtcttgaactcctgaccttgtgatccatctgcctcggtctcccaaagtgttgggattacaggcgtgagccacaacacccggccgaatgtggtttcttagtgagtcctttactcaaggctggaattaaacaaaggagatgaatcacgagctctatgataatagtctaatagtctaatctagccctcttaagtgcagagatgttttccctctgaacacccgtgtgtttcagctctgttcctcttccaatgcccttccacagggaacaaatcctttcttgaccaccaatggctgcatgacttatcctgagaagatcatggggattttggatgccaggtcaacccttacactcagcaaggaagtggaagggcctcagtttcaaacactttgtaaacacagaggttaggtcatttcctctccaataagccagaagctgagctgtccctggcagcaaactgtgtgtcaaatgcctggcgggtttcaggttttactaactccagagtgacgaaacatcaccacctctaatgccagaaagaagtcagctgttgtacctgtgtcacaactaaatttactgaagtcagggcagctgaagtaatctataaaacttagcatgtcaatttcaatttagcgttcacattcaacaaattgtgtatttaaaaaaaaatctccagtagtctaaaagttttcattttattcttgtgtaaaatctggaagactggaatagaatgttttatggtatgagtgtttagtagcaacattaggttaactgtgaccttttggctcaagacatgagaaaatatagctaacaatgcttggttatgggtttgtcacactatactttgttatactatccagcagtatccacctgctttaacagtgtggatacactaaaaactaatttaaaaaaatctgggctgggcgcggtggctcacacctgtaatcccaacactttgcgaggccgaggcgagtggattacaaggtcaggaattcgagaccagcccgatcaacatactgaaaccccgtctctactaaaaatacaaaaattagctgggtgtggtggtgcgcgcctataatcccagctactcaggaggctgaggcaggagaatcatttgaaaccgggaggcggaggctgtagtgagccgagatcgtgccactgcattccagcctgggcaacagagtgagactctgtctcaaaaaaaaaaaaaaaaaaaaaacctgtcaaatccctccatacaagtgtatgcacttcacataccaaggaggtctaggatttgaagttcatcaaggccgagtttaggctgccagaccacaacctcgttttaatgccttaggtgcagaaacaggagaaataataccttccatgcctcccctgactagctttaggataaagaagctgtgcactaaatagacagtagctgaggaacgatgaagaggatctacccaaagtatgaataagccaactgctatggatcgaactgtgtgcccctgaaaattcatgtatcaaagccctaaccctcaagggacctttggagatcagacctttaaagagataattaaggttaaatgaggtcatgggggtgtgactctgatccaataggacaggtgtccttataagaaaaggaggaggccgggtgcggggctcacgcctgtaatcccagaactttgggagggcaaggcaggtggatcacctgaggtcgagagttcgagaccagcctgaccaacatggagaaaccctgtctctactaaaaatacaaaattagccaggcatgcctgtaatctcagctactcgggaggctgaggcacgagaatcgcttgaacccaggaggtggaggttgcagtgagccaagatcgtgccattgcactccagcctgggcaacaagagcgaaactctgtctcaacaaaacaaaagaagaagaggaagagacacctctctttctctctgagaaagaccatgtgaggacatgatgcgtaggtggccatttgtaaatcaaggaagagaggcctcctcagaaaccgacctgctggtaccttgatcttggacttccagcctccagaagcatgagaaaaataatttctgttgttgaaggattcagtctgtggtattttggtattttgttatggcagccctagcagactaatgcatttatctagtcacactcagacaaaagaaagagcacaggtcagaatagctttttctagaggattctgttttctttctttcttcggcttctttttctttttttcctgaaggcaatagctgaatctgagagtaacaaggggctcaccagggatgtgcaaggaatttcttgtactgcccctttcatggaaatgacaaggaagtgatttatttcagatgtgactcagttcaggatttgaaagcacatgtgacaaatggtcaagtaaagaaaaagcttttctttttctttacttgaccatttgccacgcaagttcccaagttcttcctccctatcttgcttcattacaggcagtgggaaaaatccaaacagcttccccctgtgtctgggacatctccagctctgtggtgtatttactttgaaggaacaaaaaaggggatagtatatgacttccatcccaagtcactataggatatactttaagaaacaagggagtttaaattgctctgctgtataacctgcaaaattcatctcctactgcagaatagagtgagttgcttctcaggattcgcacctggagttggtattcagcacatgttttctttgtaacatttctgtcaattctctaaaaagaccacactttttgagctggcactaggctctctgacaatcttccaagacgaagcttttacagtccatcatttacaatgctgacaactccaggcacattttgtcaattttccctttcatctcttattaaaataaaataatatcactttggatttgaagagagcctaaatggataattctttaagcagaatgtcagtatcaatgatagaaagggaagaatctaagagggaggtaaatgttctataagtagagaagtaggttcacaatttctgaaacagcaaatcaaacagcaaatgggggaaagttatgaaaggcagaattttgtgactcaagcccatcttatgcttatacagttttttgtttttgtttgttttgagataaggtcgtccctctgtcacccagcctggagtgtagtggtgccgccaggcctcactgcaacctccaactcctgggctcaagtgatcctccaaccacagcctcctgactagctgggattacaggtgtgtacccctaaacccagcttattatttttttgactttttgtagaaacagggtctccccatgttgcccaggctggtcttaaactcctgggctcaaatgatcctcctgcctcagcctcccatagggctaggattacaggtgtgagccaccatgcctggccttttatactgtttattccctttagatacagttaatggacattaataagcagtttatgccaatcccttttcatagctaataagaagtcttatcttggataaataaaacctagccactaatgctgccacacccaaataaactctctatgcatctgaacttcttgaggttaataatgcttcattgtaatattttataaaatcaccactttggaagtgaacaccactagaaattcacatggccagtttatagatggggactgggggaagcagggaggatctctgcaatccagtagttaggctctgccagaatgtatttagagttgtctctaaatacattctgagtctctgcttcattttttttttcaatgaaaatgacaatgtctgtcatcccatgttcaagacaaatataacaagtttctaagaatccttatatttttgttattgcatataagcatgagttttaaaaacctctgaatgtttaaaggatcacctgggggaataagaaaaatgcagatctctgtaggtctgaggtagagcccaagaatctgtatttttaactagaattcctctaaattactgtgcttcacttggccccaattacacattaggagacaatgatttcaggatgacaatcagccttttccatccaaggacttaaagcagctaaaccgaagacaccgacaaataccagatacttttctcagtctactggctgatggcacaaaagtgcagaagtcacgtagggcagtatggaaagctcgagctaggactggagtcagcgagagacgctagcttcccctgttcgtggattccgaagcctcaagcccacattaacaaggccttagacgacagtaaacacccagactcaggctcctacagagggcccccagttctgctctaatatacctatttttctttaaataaaaaacatctgatttttgcaccccaggtatttaaagacacactttgatttctgaaaggcttttgaccacacatgaggaactccttgggccttgaccatttttagcactttcacagtttctgattttgatcaagccacttaatcacccaggattctgaatctgaaaaccaggagggtttaattccactttcatgttcccttgaggagctgttggcagcaggatgaaggcaggtccatacagaacatgggaaggaagccaggaagccagcttttcctttcacatcaaagagatctagaaagcaaaacctgtctcacatttgcatacaatattagacttacatatggatgccatgtctgtcaaaagacaggctaattagggcattagtttctttaatggttgcgatttagtaattcacaaatagtcccacttaatttttcatcctatacctaaaggatctacttcacacttgaagtttaagaaggcttctcccttaagatagaaagaaggcattcaagtatcaaaatactggtttcctgccaaaaaataagggatgagaaaaagcagacacttagcttatcaatcaaaatgctggcagggaaagactactggattaccaagttcattcccctagcctgcactgattcctctttttctctaaagtttcttattttttcagtttttctcatgatactgacattgccaaccagcagtctggaaactgttcaggttgattcttagcagaaaatcgaggggctctcctgttactgttaatatccttaaaacacttaaatttggttagtttgcttcaagcattctcagtatattacaaaaaaaaaaagtactcaagaatttctagactttattttgactgacatcagctaccctaatgaacaggaggggacaacagcaaggtatattaggagcatctccttcctttttaatcagaattatataggaattaagaactctaaggccacagtagagtatagtatcttggaagaagaaagcggagaatgtctgacattttcactgatcgtttaggctgatggcttaaaccatttccacccaagtttcttacaagttagcatttccagccaacattacctactgcaatttctctataatcttaagggtattgagcccccaaatgagagagagaaaagagatgtaaactaaacaggagtcagagaaggggaaactgagtctgttgcacatcatttaccctttaacatgattttaaaggtaataatgcttataaaaatattagtagtagtaagggatatcaggtgacaagcagaagtgcccctctccacagatatgccagtgtatctgtagaaatacggtgctaaaattagaaaagactgaacattttaatttattaggtagacccaaatagtctaaaaggtttcacccatatacttagcaatagtttatgaaagttccttttcacctatccttatcatgacaaggcataacagatttttaaaaaactaccaattggccataatttttaaaaaattacattttcattgggtattaataataagaagttgttcaccttttaatctacaactaattatcagatatgcatgcattttttttctatgaattgcagctgttaaatttttgtgaattaatccaatgcatcaattcctttgggttttcaccttaaacatttttgtggcatacaatttgtataatgtgaatttagaagataatagcataggtgactggggtgctacaatggattctcacctatttattaactttttaatgagttgattagtctctaaatcagtaattcgcaaagtttagcatttatcaatgtcacctggacagcttgataaaatacagattgctcagccccatccctagctttgctgattcaggaggtcaggggtgggatcatggaatgtgcttttccaacaagttcccaggtgatgccaggcgatgctgatgttgctagactaaggaccacacttggagaaccacagctctgaaatattccctgggcatggtatttgcaatacatactttatacctaataatttgtttcaggacacacaaatgcacatgagatttgatacatactctcaaaaagctaacaatcagttaagtggtaattcactgacatgtacacatcaaagtaatgttagacacatgtaataggccaagattggggatgggcattataggcagatggaataacataaataaatgcatccagggctatggatataagatcagcctggctggcaaagtcagactcatgaaggagattaatgggaaaacctatctgttttgtctgtctcaggttattttgaggatcaagtgaaacttagaaacaataacaacaaaaaaagcaaagtctgtgatcaagaagaattactctgttgcaacaatataaactaagaaaaaaatacgcaaaattctctgctgccttgggagatgatctcatgatgtgtatcatttacttttaatatttttatttatttatttttgagacggagtctcgctctgtcgcccaggctggagtgcagtggcgtgatctcggctcactgcaaccttcgcctcccgggctcaagtgattctcctgcttcagcctcctgagtagctgggattataggcatgtgccgccatgcctgcctagttttttatttttagtagagatggggtttcaccatgttggtcaggctgctctcaaactcctgaccttgtgatctgtgcgcctcagcctcccaaagtgctgggattactggtgtgaccgaccgtgcctggccaatgtgtatgatttaatagccagcagcaacaggccactaacatgccatctgctaacaggggctctagctattaacatcaacagagctaaaaactcttatgtctgatcccttgcaaatggcgaagacctggctgagaattattatctcatgctttcagagaaaactttgcttgtcctgcactgaaaaatctggctgcaataatcacatggaagaaggtatgtttgttggcatggttcatgggctggcttatgacttctaagcagaagatacaaaataatataaaattcctgcaacatgcacaatgtagctgatattcatgttctctttaaatatcttaacactgacttacatatttaagggtgtggagtctttgagcttgggaagcatcttattactgaggtacaaatgctaaaagagggacatttcttctatctaccgcattttcaatgaaaagatgctgaaggtgaataaacagctctgcaaacccagttttgtttaacttggcaacagcagtaagtaagtatcactggacacagagacactggaatagattcagtctttagtcttattcatcacgtctgaccttgggcatattacatggttttcctgagcctatgaaatcatgcggctgaacgagctgaaaactaagattctttcctttgctaataaatttcagcaaacgataggagtaagaacggctgtctaacgagactaccaaatgctacgagacgcagcaagcaatgtccctttacctaatggatacagcttcttaactgtttatccaaagtctccccaagcaaattctaaattattctaaattatttgagtaacaaagattgggcccttatacctgtgacgtgtctggcaatgacaaagaatgtggaacatgggaagcatttaatacatatttattgaagatcctgtgtccttatttcttcaatctccttgctattcacaatggcgaatgatatgaatatacatatatatatcctatcatggtaaatatatataacataaatcttactgttttaaccattttaagtgtaacgctcagggtattaagtatatttcacgatgctgtgcaatgtgatggacgatgcatcacggccatccatcttccccactgaactattttcaatattgccaaattgaacctctgtgccctttaaacactaactccacagtccctcatcctctcagcccctggcaatcagcattctactttctgtatctatgaatttactaccctaggtacctcatgtaagtaaagttccatataaaacactttacaaaatttgcatgtcatccttgtgcaggggccaggttaatctctttaatcattctaattttagtatatgtgctgctaaagcaagcatcatatatatacttctttttttttgagatggagtttcgctcttgttgcccaggctggactgcaatggcgcgatctcagctcaccacaacctctgcctcccaggttcaagcaattctcctgcctcagcctcctaagtagctgggattacaggcatgcaccaccacgcctggataattttgtatttttagtagagacggggtttctccatgttgaggctgatctcgaactcctgacctcaggtgatctgcccacctcggcctcccaaagtgctgggattacaggcgtgagcaccgcacccagcttttttttttttttctcttttgagatggagtctcgttctgttgccctggctagggtgaagtggcaggatctcagctcactacagcctctgcctcctaggttcaattctccaacctcagcctcccgagtagctgggattacaggcatgtgccaccatgcccggctaatttttttatttttagtagagacagggttttgccatgttggccaggctggtctcgaactcctgcctgactcggcctcccaaagtgctgggattacaggcgtgagccactgtgcccagtctatcacatatacacttgtgaaaacttctaagacttccttacaaataaaagtggtgactgagaactaagccatatacctagtgatatctcagtggtgatgataaagttagtttttatttgacaaaatctatttgctatcagaatactatacttaaaaatcataagctttaacaattaaatcgcatgtataaaaattttagagaacatgcagctatagcaacttcaatgctatacaggaagctgaagacataggtccacacctcagtatctgccctcaggggatgggcagacaaatttcaatgcccccccccaaccaaaagcaaagacacaaaaggcatgtacaagacaatacaagttgttgccaagcactgtttcaaagaaataagatttaactcatgcttttaggagcatatgtaaatacataataattatcaaaagacaaacacattaaacaggcttttttaaacgcactatctgaagtcaatgaatccatcaacaggagctgaaattaagtaacgccctggccttgaccctctgaccccgtttcatgctcgaagtccaaagcctcttcacaaatagtgtttaggtgcacaccaagtcaacattcctttggacacgtctcataacttggaaccggttaatagatggatccactatttttgatgagatattataactaaccttctatgatttactttctaaagcagcccatagtgcatacggcaggaaaactgttaactaataatggcacttactcagaaaatacatgcaaaatttgtttctgagttgaacaccaacaagcaaattaacatgtcttccaaactccgtctcacatgaaacaaactcatgtcattcccagttagtgtttgtggaaacatatttcaaaattaatctcaaaattcgggaaacatatttcaaaattaatctcaatttggattcatctccatactcagggtggcaaacatcactgatttttttcccctcctcttttaaaaaatgaaccttgaaggcagatgcttgtgaaaaacagaataaccagcccttgttccagtctaaaatcattggttgttcccaagactctacaaaaaaagcaggacacatctgctctagtgttccatgccaggaagtagttccacagccaccactgtggtctgacttcacttcccaatcattttaatttggatttctttttagattttgtttcaaattacagggccatacaaacgagctggtgagttgagaaaatagctttggaactgcattggatcatcaaaagaaacggcagactttggcgtgggagaccatgcctcaggctccatccatttggttgaggtgcccacacatgcacaaaaataaaagaatggcataaaaacagacaaaaactactgacatgtcagtcatcatggcttaaggaaaagctcacaaataatttctctggaatctcaccaaaatttggagtaaaagatgatagcatgctaaatcagttctcttgctacttctaaaatactaacgttcctgaatggggctcaaggtggaatcatttcgaggcaaatatcagttctagtagataaaagtgttgtttaaaacctcattaacattatatataaatattccccaaaatgatctacagatccaatgcaatccgcacttttttttttttttttttttttgcagaaatggtagtgggggcagggggtgaggaagatcttaaaattcatgttgtaatgcaagagactccggatactcaaagtaatattgaaaaagaagaacaaagataacggactcacacttgctgatttcaaaatttactacaaagctacaataatcaaaacagtgtggtactacagtaagcacaggcacacagatcaaagaaaagaactaagaattaagaaataaacccatattatctatggacaattgattttgtgtaatagtgccaagaccattcaatgggggaaataatagtctttttcttcctttttttgagacagggtcttgctctattgcccaggtggcgtgatcaaggctcactgcagcctcagccaccccaggctcaggagatcctcccaccacagcctcctgagtagctgggactacaaatagatgttatcatgcctggataatttttttgtagaaatgtggtcttgccatgtttcccattctggtcttgaacttctgggctcaagtcatctgcccaccttggcctcccaaaatgctggaattacaggcatgagccactgcacctggcaagaatagtctttttcaacaaatggtgctgggacactggatatttatatgcaaaagaataaagtcaaacctctacctcacaccatatatgaaaattaaaatgaatcaaagatttaactgtaagagctaaaactacaaaactcttagaaggtaacaggtataaatcgttgtaaccttgtttcggacaatggtttcctagataccataccatagtaactgccacaaaagaaaaaactgataaaatagacttctaaattgaaaatttttgtgtgtcaaaaggatcctattaaggaagtgaaaatacaacctacagaatgggtaaaatatttccaaataatgtatttgataagaatttaatagtatccagaatatataaaaattcttacaactcaataataacagcaggccgagtgcagtggctcacgcctgtaatcctagcactttggaaggccgaggtgggcaggttgcctgagctcaggagtttgagaccagcctgggaaacatggtaaaaccctgtctctactaaaaatacaaaaattagctggatgtggtggcatgtgcctgtaatcccaactactggggaggctgaggcacgagaatcgcttgaatccgtaaggcggaggttgcagtgaactgagatcatgccgcttcacttcagcccgggtgacagagcgggactctgtctccaaaaataaaaataaaaataaaaataaaaataaaattaagaaagtaaggtaaacaacccaattaaaaaattgggcaaagaatctgaacgtacatcatttatttgaactgaacaaaataatccataacaaaccattgcaatcgcatgaagaaaacactgtggttgatatttaattcctcaaatttctgccagcgtccatttggagcacaataaacaagatcaatatactgcactgaattatacatattaaggtcaacaatttgtctgccagaatggtagagagcgcaatatttttttaaaaaaggaaactttttttacattcattattcctagaaagtgtattctttttaatgtagctaaaaggatttactttttcctaaaattatggagtagaaatacataaaagaaagtatctgtttgccaatggtaaaactataaaaatcattcaggaaaacggatgctgtattacatgtgaatttttaaaggtcattatcaatgacttccacagatcatctggatgacatatgcactatatttacagattccataattaagctccaaagcaagaaaaagagagcttacctaatatcacaaccaaaaaaggcatagagagctaaacgtatacaaagcactctactaaccaccactatggggtgagttcgacacctgcaggtctgtaacctcaagtctgcagacagaccagttggggacctaaggtatgaagtgtactggcattcacacatttgtatcttgctgtgtggagacatttcaacatggcagtccaaatgtcagaaaactaggaggctgtcttaatagtataccgtactttgccattcatttgacaaagcattttcatttataaatgagtggttctattttgaaagagaaattgtcttgggtcaaagatatacatttagacacaggcagctaaacttacaggcctcatgtctgttacttaataacactagggaaaatatgaataaggagctctgagactattatgaaaccaatgggggaacaaggctttggttgttgataatatgtataaatgttcttggccagatgtgggggctcacgcctgtattcccagcattttggggggccaagatgggcagaccacctgagatcaggagttcgagaccagcttggccaacatggtgaaaccctgtctctactaaaaatacaaaaaaattagccaggtgtggtggcacacgtctgtagtctcagctacttgggaggctgaggcaggagaatcacttgaacccgggaggcggaggttgcagtgagccgagatcacgccactgcactccagcctgggtgactgagcaagactccatctcaaaaaaaaaaaaaaaaaaaaagttcttatgtccaaatacttaagtcagctgtaaaccattaaatctatatacatttaaaagtcatttcttatgaaaaacaaagtcacacctatgttcttataagaacaaagtgacagctctctatttgctgttatgattttttttttttgatgttcatccttgactaacaattacacataaggatacttgaaattctcaataacattaaatttctattttgttgggctgggaagtgctataaatattctattttaaacctagtctactttggacccactaaacccccaaatcaacaggcttattagaaacagaatatggaaacactgtctttgaaataaccatgctgcatttttcctgaagagtggaacattttatcaagaggccacagtaaaattgtaataaaaaataagcatcctttcattattgcgaatttcttgattccccgccatatctttcaatcctgccccattcactatggatttattcagccagagatctttcccgcatctggtttataataattcatgtttttattaattttgaatgctagaagaaaaaaaatgggtatgaaacaattatgcctttgttccctctttatttcctactgcctttctcataaattggttattatagcattctgtaaaacagccatctctgaaaagagctacatttttagccttgaggtagctgcaaagagaagcacactttgataaataacctcagtgccaatacaaagagtagaatagaatccttttagcagagatttaaggaagattacaaaggacaaagaaaacaccatcatttttaagtaacaatttgacaaagcaaaggttgaaaggatgaagggattctgcccttttgaaggattaataaataattaaagcagaatatgaacactgaagaggagccatagtttcactgaaataatgattccatcgtttgttgaatgaaaaaatattaatgaagacctacatagtgatttaaaagaggagattttatctctatacaaacaatgcctgaggccattctttgcaagaaatcttcataatctgcctgaaaataactttttaaaaaataaaaacattaataaatgactgagcctgggaacttgcacataataattaaaattgaatgaaaaaaatatgaaattataaaataaaacacgggccttttataacacaacaggacacttgaaaattcacacttatttgtcatgggaatagcttcagactgtggttggcggtcaaacaggacagcacaattaaatcaagtagatgaccaaatagcagagggtcatggtacaaagaaggaccatgttgtaaaattttattaataaaggtcctcagaaccctgatttatgctttgttatcttggccaaccacatccatttagttagcttgatcaatcacagctttagaggatgctgtggcctaggaaagaaatttgttttgtgtggtgcttacgctagatgtcaaggaaggagttttggtcaggtctttagggttacggaggagcccacttcatcagtccaagttaaggagcatctgcctttttatcctggggactggcttcaaccttatatttataattactaatatctaaaaagtaccagggtccttgctggatcttgaggaggcaaggatgaccaacatatatctggaagagttcacaggatggagggttagtagagatataaacaaataatttactccaagttagagtatggtattggaggtggatacccagtgctttcacattgaggttaagtaggggaaaattccacttcagagaggaaaataggcagcagaaagaacacagattttggacttctggcaggtcttggcttccaccccactttcatcactttactatctgggctgggcaagttggcaaactctcttaggttcaaagttcaatttcttcaactgtaaactggggatgctatcactgaatttccgagtatcttcactagcccatatgctgcctttgtgtgaaatgcaagaacagcccacttccagtgggtgtgcacaatgccagagggcttggctccttgagtgggatgtagaataaaattatcagtctccactcttaccctaaaccacctgccactgccacatctctatatggcggtcctgtacctcaacggggaacattcataaagaaagaatgtgaccatcagcattatcacaaagaggcactcattagttggttacatggttgtcactcaaatgccagctcttttctccgttctctatgcaaattagaaagggtttataggacttgggcattttacttgaatcttgaaaggtgcaacttttcaagcaaggaaaaaccacaagcagctttttttttttctttttttttttttttggagacggagttttgctcttgacgcccaggctggagtgcaatagtgcaatcttggctcactgcaacctctgcctcccgagttcaagtgattctcctgcctcagcctcctgagtaactgggaattacaggtgcctgccaccatgcctggctaatctttctatttttagtagagatggggtttcaccatgttggccacgctggtcttgaactcctgacctcaggtgatccactgccgccggcctgcagctgttttttttgttttgtcttttgtttttaagggaacttgcatagttccgaaaaggaggaattgaagtgggagggggccaatgtgagataagaggtagggtgactggctgggagtctaatgacactgatgagaggacaggatctcaggtaagtaggggatgtgcagagatttcacatgaacacagaaggccaaatatacagaacttgcaactaataagaaataatgggtgagggagaggaaggcatcatggatagtttaggccaaccaagagaactcagaatagagtgtgtaaaacaagtaaatttccagaaggacatgagtgttatacacattgattgcaggttcagaggcacatgggatatttggggtctggaatatggcactgggattcagtacgctggctgtggctagacccatgaatttgggattcactgaagttagtgggaaagtagcatgaacagacaggatgcctcagggaagcacaatggaagatacaaggccagggccagaactcacaagcatgatgaaccctatgctctggtcacagtttactgctcacaaatttaatgtcaattttccccttcaccgatagcattccttcttctcagcatgactccattcttcctcattttcacccataaaagagaattctaattggaagcataatttactgaagcagatatacctctcccactaaagatactggcagttccccagactggtgaaaacctcttatccataaagcaactgttaccattatttaattaaaccattgtatctctctacagatgtttgactgcattaagcacatcctaattgcttgtatttataagcacaaacttctatacaaaaggcatgcatttttagggactttaaaattttctccttttgccagtgtctctgaattttagtatgctatttgtactgaactgactccaaatctaaaatttgattatatacagaaatagcaaataaatgcaactcagactaatgacaaagcatttaatcagagaatattagaacgactacaagacataacctggaaaaaaaatctatgaagaacctatttagaaagtaagctaaaagcaacactttttattatgagaaattttaaacacatacaaaagtaaaaagaataacatgaggaacctctaataacatttggcttaagcaattagcacccctggccaatcttgaagtttcaactatattcctactaaaaagggacgtattgttttaaatgttccttcaaatgaaaaaggactatagatgacaactaggttcaacccagaaaagctattctccccagcaaaccacttctgtagctttgacactagcagctcagatagtgtacagggttcgttattgcaaacttctctttctatagagaacagtcatttaaaaatggaagcacccaggattccaaatgaaaggtttttaaaaaagattatctttcagaatgtggcatctggtatatttagaatgatatatatgtcattacttaaaaaaacccaactaatgggtggattgagagcatattacatacatacacacacacacacacacacacacacacacacacattaagagcacatacgtaatatgttctttatttttattatactttaagtttgagggtacatgtgcacaacgtgcaggtctgttacatatgtatacatgtgccatgttggtgtgctgcaccccctaatatgttcttaatccaacctaatggctgtttttttttttctttttacagaaaaagattccatgatactagttatctaaatatcctccctggtactgagatttgaagtttattgtgctgccctattcttgggcatttcgtaatattcaagatatctgaaccaccatctgttctgtggaagtgtgactaattagtggctaatgttttcagtagtatagtgccaaataaaaagttctaataatttaattataaagagtcaacaataattgctgggtgagggtggaatattggtcatcaactttttagtcctttgtaatggcttatttccctatagttattacctatgccacttcaactgaagtcacatgtgaaaacaggcttaagatagctgtaaaaaacaaacaaacaaacaaacaaaccatgttttctagaagattttagcttcagttcattaagactgataaattatttcattttgtaccttctacaactttttggagaacttctttacacttatttaatacatagtattttaaaggttccttactgatgtctattctccaagtatacctgaaaagtatatttgtttgctaaagaaacttgatacagtgaaaaattaattggagatctctgttctcaattcatggtgtagactaaaaactccacctccactatcttcataaattcttgctcaacactgagttgctccttctgaacaaaagcttggcacactatgaagttgctttttttctcttcttttttaaattagagagggggtttcaccatgttggccaggctggtttcgaactcctggcctcaggtgatctgctcaccttggcctcccaaagttctgggacactgcacctccctgacatatgaagtttcttctgcaagttatgtagctcaaagtataatttcagattccgtccattaatgtgcagtactgaacagaacatcatcacttgacacatgccaaatatttcacagcaatacaaacaatatttacaaggccacataaatcaggaaagaatgagcagaataacactggcataaaatgggaaaaagtgagggccagctgttcccttgagcggtgtttcaggcacttcaaagtcggacttactgtaatgggtacatccatctacaacatcctgggtgctctgattccagatgataacctgtatctatttccaacccaattaacaaagggtaggattctttatggggaaggatatgccagatacatattgcttatatgttggtagactacacactaaatctccagtataggtacatatgcttatattgaaagatgcaccaacataatcgtcatctatgtacctttgtgaagtaagttaaacagttatgggcattttggcagctgacagagactcatgtggtatttgattctctttccaagagaaacagaaatgagagatcttaaatgaaatcattagtcattaggaaaactagggacataaaagacagtgggcacacaaggtcagtttcctggttttgataatggactatagttacgtaagatgtcactggtgaggcatgtgggtgatggatgcatgagacctctctgtactatttttccaagttcttgtgagagtacaattatttcagaatataagtttaatagcccactatcttttaagtttaaacaatgatgtggttcagagaacactcatggcttccctgctcagccatcaaagagaattgtgacttactgaatataacaataacctcaaagtcacaagtcacagttatgtgttttggctgtgctacttataatgcatgtgacacaggccagtaagttactcaaattttaagtttgagctttttcatttgtaagatggaacaatcgtgacactcaaaagatgaagaatgagtttttttccccattaattgtaaagtaccaaagcatcataatttgagagccataacaagattgggcaaattagaaaaaatgctgccacgtataattcaataacaagtgtccaattattacaaaactataccctaagtcaggcgacattcctccagtcttacaagtatggagaggtaagaactgattcaattgctaaggctagtaagctagttccagcctgacagtttcatcgtaaaaggcaagctgttctattaacttccatattcctcaaacagataactcacttcctcaattttcctctgggggaaaatacatgtccatgtgcagcatcaaaagaacagcttacttaccaacttcatcctgaatctcctcggccactgcaggcacgttgtagagcagggagagagactgattcatgcgctcataaatcacacggaggtgtgtcataacctgcatcaaaggatgacaactccaggtcaacaatgtctgggggtaggaatggttctttttctttctttttttcttttttttttgagacggagtctcgctctgtcgcccaggttatttttcttaccaagcactgcaggtagatacaaacttccaaaagaaaactgacaaaacactgctactgttaaaaaggttgaactgaaagggcaactttatttttcttgttctcctatttctgttctctaactttttgagctcaggtttaagacttgatcttgaaacttaccattatcttgtatgcttataacagccaattaaaaaggctacctctgccacctctgattcctaatactgaggctctcttaacaggaccctcatgcctaaatacatttctttgcaaatttccccctagaaaacaacgtatttcaatttgattggctatttcatgctatatatatttaactctttcattcaagaaaatgtaaaatttcacatttcctaaggtagatcccagttttcagcctttgggaaccggggagtataaaatacattattactgggcttcatttaggctcacatgaaatctcaacattccagtaggtttatgattgcctgccatacttcagttgaaccagttttcaagattttagtttatacaacttttgtttttctcattttagtcattggttttaatcagttccttagcaatcagttagcagtagactaagatttttacatttgttattttcataactcagaaaatgccaaaccacatattgctctaagacaagcttttagaatttaccagaagttaaagagctcttgccatagggaaaacacctataggtgctcggagaatgcgtgggatcctgtcaccaacccaagaagcaagaatcctggattgtcaaagctgcagaagatgattataccccacgcttacctgggaccggatctgagcggctttcttgggatccaccatgcgcacatgctcgaaatgctttagggtgtgctgtctgtccttctgttctgcgcggacatacttctttagcatattgaacacgtgacgaggctgtgggaggaaaatgaaaaactctttttcaagtttgtgcaaaacactgcttcttccattggcgatgggttagaggttccactaatgcatccggtcatgtgaacgtactgtgagtcacctttttgcaggtctgccttctaaacatttctcctactcctttcttaatgggtaattacttagatcggctgcttttcacttccacaagagcatttaacattctcgacatatatgatgactgtcctccttactcaacattttctttttaaataggagtactctgctatagaaagagaacagatttgaggtctgtcaggttaagttaggtccttctcttttcgcacccaaggggcatatgtgagactacattgctacgtgtacattttgaagaccagaggtaatgtcacacagataatcccatcaccagtaacatgtaacatacgaaatcaaaatgagaaaaacaggaaatttaaccactattttgtaagccaaggagtaactgaactgtaagagacattatatttttctaggagaaaggccattgctaaactgtatttattttactctgaaatttaattaagttctttctaagctatcagattctaattctttcagcaacaattacatttcgtcttaagtgctcctattttctttctaattggttccatttcatttttattttagttttacctgaaaacatccatcctaataaaaactaaggacaaagattccctggtcttcaacaatttcatcactatatgcattccactacatgattttgtaagatgatttccaaaaacacaacatttcttcttcattaaaacaaacaaacaaaaaaaccagttgtgaaaattcatgttgggaatagaattttggtcatttgggcaaacctagctattattaacccatgtgtcatgagtaccctgaaaaccagttggaaggtacaaaatttattccagagatggtgtgtgtggtggtggggcgggtggtaatggagcttttgttgtgttatccatatcctatgggatgtgcctctccttccccttttgcttagttaacttaggagccatctccctgccatctcaggtggaacgaggtaccctttttctgtgctcctatgaaatactgtgcaaatccccattaatgtacctaactcattaaattatctatgattcttactcccctctttaatgtgagatccacagggctggatttggtcttttttctttatttggaaccccaataacacagtgcttgacccagagggtgctctgtatttgcttggtgaatgcctgccacagaggccatgctactgtacttgagaaaacaaatacatatacacaataaaaataaaacaacttgggctcatctgccttcttttttcctaaaagaaatgtgcttctctataatccccagaaagacagccatcacagcttgcaacagttcttggcaacttattacaactctcatctgaactgtgaaatctggttgaatttacaaatcagaggatgaccttttaaatctcagaagaaaagtagtaaaagaggtaatgactgataagctatatctctatatattgaaaagaggataggttatacatgtgaattaaaaaaaaagaacatttgaaaacatcagagattaaaggctgactcttgttgattgtgaaggatatttgatatgcagagttgtgtgatcaggatcttgcacaaccaccctcgatgcttgcttgttattaagcaccaaggtcttagaaatctctctagttctgttaccattattcatccaagactggagacagaaggggctgtgactaatcgcatttaaccatgatgttccttcctggccttcatggatgctttcttagttgctctatttcatttttctcccttgtaaaggatttattgttttgaagaaaatgggatgaatttttaagagtttaaataagaaaaaaaaaaagcacttcaattaaaaaagtaaggattgctttgggagtctgaggcaggaggatcacttgcagccaagagtttgagaccagcctggacaacattacaagaacctgtctctacaagaaaattttaaaaattagctaggtgcagtgacacatgcctgcagttccagctacttgggaagcttggtcaggaggattatttgaacccaggaggttgaggctgtagtgagccctgattgcacgactgtactcaagcctgggaaagagaataactgcctgtcttttaattaaaaaaaacaaaaaacaaaaaacaaaaacagtaagaattgcttttcatcataacttctttttttccagttagtcatctatgaatgtttttgtaagatattttgtcctaaaaggactgtcaccaacaagcaggtacaccaggatgccatggccccaggctggccttggcattactacttcaagctaaatttcaatttagagaagatgcaggtcatttctgatgaccaacatctggatctccccttttcttctcctatcacaacaaacagcatatattcccactaattattattattattattctttgagatggaatctcgccctgtctcccaggctggagtgcagtggcgtgatcttggctcactgcaacctccgcctcctgggttcaagtgattctcctgcctcagtctcctgagtagctgggactacaggcacgtgccaccatgctcagctaatttttttgtatttttagtagagacggggtttcgccatgttagccaggatggtctccatctcctgacctcgtgatctgcccgccttggcctcccaaagtgctaggattacaggcgtgcgaccagtgcacggccaattaattattcatgttaacatacatttaaaaataagcacaaaagccttgacttttcccacctatgcaattcagatggcagtatctttcagatagtatttgcagattaaatgtgttcagtgatagttacccagaatgatgcgtagtccattgctgatactcaatacacatttatttctttcactcaggccttatctataaatcatcgacccctttctttcctctaagtaataagagttcaatgtgtattgactgcttctgaatgagacagtatattaaatgctttttgctggtaactcatcaaatcttcgtctcagccctatgacagagtcatagcagctctccccaccttattggtgaggcatgaagcacaaaggagattgtggttacataggctacatccctggcccaatggttacacagctagttagtgttagatttgaagaatgggttagtctcactgtcttggctccagagcctccttctcctaatcactttgtgatctggcccttcaaggagaatctaaaatagaccaagtttaagatagttctacaaagcaacttacgaagttaaaaacaggccaggcgccgtggctcacgcctgtaatcccagcactttgggaggccgaggcgggcaggtcacgaggtcaggagttccagaccagcctggccaacatggtgaaaccccatctctactaaaaatacaaaaattagcaaggcatggtggtgggcgcctgtagtcccagctactcgggaggctgaggcaggagaattgtttgaacctgggaggcggagcttgcagtgacctgagattccaccactgcactacagcctgggcgacaggacgagactccgtctcaaaaacaaacaaacaaaaacaaagttaaaaacaaagaaataagtgcatggttagaaaagacagtctgttccaggagtacttgcctgactttctagtttttacaagtgcaggtaatattctgtgggccatgctaacatcagctcctttaattgtgcagaaggttcagatttagcttgttcagtctctcaattactgtcctaggtttctggagttccattattccttagctaatgcatgaaattatttagctaattattaagctaatgtgtggggagaagaaagagcaagataggaatgtcctctatccatgtggataaaggattaggattactggaaagtgattcaaggtattaaagttaggcttttgtgacattcatggtttctagtgctaaattcatccttatcttctattgagatgggtaattaaatggtgaatgtattcacatgttttcaattgctgatctcatttaatactgccattctccttcaaaatatattcctaacttatcctgaaaatccccagagtttgataataatgttcccggactgaactgagggttgggctactatacctcacagcccaataacgagatgcagatgaactgggaggaagagagtttttatttttgtaaccttttacagggagatggcctggaaattagtgccagaccaactcaaaattacaaagtttccagaacttatatgccttctaagctgtatgtctacgtgtaagtgtgcattcatctcatgacagaagtgattaacttctttaatccataactaaggtctgagtcctgaagaccttcctctggagtctcagtaaatttacttaatctaaatgggtctaggtgctggggtgattactcttatcttgtctcctgctaaatcagggaggtttgaggagttcctgcagacctccagtaaacttgttcttggaggcctgtagagtttcttcagactcccagtaaaacttgttaatcctaaatgggtcctgttaagaattccttggttttgccaggaaaggcctaggcaaaactcttggtgggcttttgttacattccagcctctgtataagggcgctggcttttttttagcttttagtatttaactgaaccactcagtcagtacggaaacagctgttacggaggcctgcattagtgagatttggcctgccacaataacagagtagcaaaggaggctctgaggactccccaggcctcagctcctccagggataatgagacctgggaaaccccttcactgtttatgtaagctgagatgcgcattttgtgtgcatctacataaacacaagccttttcttcctaatgcctattggataagcaaagcctgggaacatcagataattcaggaagaccttaggatatctcccaataaatgaatttgcagggttctgcttcattgatttggccacctaaacacatctctaggaatcatgcttggaaatgaaaacaaaatcagattaccttctttgttggacggtaggcaaataaatcataccaaataaaatggtagttatctctatccctcagaaacaaatactatttttagttaagaaagaaaaaacacaggtgtaaaaagaaaataattcttggggcccccaaatcactaagctaaagggaaaagtctagctgggaactgcttagagccaatcaccctgattgtctaccctggagaggctaatcagaaactcaaaagaatgcaactgttcatctcacctatctctgacctagaaggcccctccccacttcgagtcttcctgctttttgtttcaagctgtctcgcctttccagaccaaaccaatgtacttcttatatgtattgactgatgcctcatgtctccctaaaaatgcataacactaagctgtgccccaaccactttgggcacatgtcatcaggacttcctgaggccgtgtcacaggtgcatcctcaaccagggcaaaataaactttctaaattaactgagacctgtctcagatttgctgggttcacatagataacagttccctatacttttatatttttgttgaggttaaaaaaaagacctccctccttttgatatatgattcctgcatatttcactcaaataaataaataattgccctcacaacttttggccaaaatacaaatcctccaggcttaacatttgttatttcttgagctataataatgtatctaagaataacaaggtgtcctgattgtctagtgaggtttattttattatgctaagacaaagatgaatttcttaaaattttaattaaaaacacagaaaccttcatacaggaatggtagggaaaaacccctctgttatctctatagaaacatattctcttaaagtaattgctattactattgtcacaatattcatacttaagacgggttattcatatgatcagaaaaacaaaagaattcagtggctcacgaaaaggatattgataaagagagtttaagaaacattttttttttttaacctgcaggcatataatccggatcaccctcatgtctttaaatcttctgttactagcaataatttttctgtgtattaatactacagtctggttatattggcattagatggctaatctcattattaaaatatatggcaaagaacagaggaagagatctgtcccaggaggactaattataccgaatcctatttattgtcactactgtttctgaaacagtgtttagctcataattatgtgctgtctgtttgcaactgatgtgacattttttaatttgtactaaactcacctcacaatcacactgccttttaaaaaatcattcaaaataatttattaaaggattaagaacaggcaccaccgaaatggcttagacatcatttacagcaagaggaaagagaaacataagatttacattttagaacattactcattttcctctctggaaacaagagcgtaatgtatttctacctctaggcacagttcctgccacaatttggttgctaataaatatttgttaattaaattaatgagtaacttgcagctagatacaatttcagaaataggcccagtagtgcagaatatccttcatagtcttcaagtagaaaacaaacacctctctactcagaatagtggccttcccaattttcaccgaaatactgacattaataaacctacttgatgtatctatatagtgtgcttgggtactttagaaagtagttttaactgggaactcttcccagaaaatatttaatggacttcatagcgtgcacaaactcgtctcaaagagaagattcatttcattaatttcaaaacatctcacatattgtgttcttatagtttgatgtcaaattgatgtaggtaatattgaagaaaatttaatggcctttcctgataaaagctaacacggttttggagatggagtctcactctgtcgcccaggctggagtgcagtggtgcacctccacctcaactcactgcaacctccacctcctgggttcaagcaattctcttgccccagcctcttgagttcagctgggattacaggcgtgcaccctcacaccgacctaatttttgtatttttagtagagaagggtttcactatgttggataggctggtctcaaactcctgacctcaggtgatccacctgcctcggcctcccaaagtgctgggattacaggcgtgagccaccgcccctggtgctagtacattttttattgatttccccatttcttagacgtatttactttttcatttttcttttatacgatttctcaaatttggtgttgctgggacttgggaaaagtctcatacatttgactaatggcaggatgactcaatgccagtcacgtctgaatatgtagcttattacttgacagttcacgtgggaagtgtattaaaattattaagtcctattgtcccactccacagctttatgcttgatctagaaatctggcatcttatcataatagacacttgtgccctaaacccgtttcttatggaaggcagtgaagtgtcaagagcgtttaaaagccctgggcataatcctgccaagaaggaagtaaatgactcactgtacgggaatcaccccaacctttccaggtcacagaaaaccctctcctggagcattaaattgcaccctggtggtttccaaaactgaacaaagcaattctctcctgctttcataaataggttcagaactattattttcacagttttacaccctggatttcaagaaatcttgagcatataaaatgtagaaaatttccgtgtgcaggtttaaaaatcacactttagagagttaagtctctctgtgcttgagatgatcttagttaaacgtaatatttggggaaactgccatggggacctctgaatcaccacctttattgtctttaatgccaggagttgagctgaatttttaaagtctcctgcaaaatttatccaccttcctttcttcagaaaggcaaacaaatgatctttgtagtttaaggtgagtataaaagggcaaatgataatcccatgccaaggtggacacagaagtcttgaatgaagcaatggagaaaatggcagtagattctcacactctccccctttggtgtttcttaagttttaacaatatggatccattagatggaaggatattgaacaactaatctctattaatccacttagtcataaggccagagcaaaacttttgtttatggccaaggagttatcccaatgttccttcccagggtatccggtttgctgatgcggctctgattttgtactgaacatgacgcaggagcatctaggagtcatctatcatctgttctctccttcccgtggaagcagatcacttcctcatagggatgtgtcaccaaagcctccatgtacttcctctaacaatctttctcctcttacggaggaagacatcttcctacttcacaattttgtctcaactttcaatgaatccttttgattttctaattatggctaacaaaagctaaaacaacagaaattgcagaaagaggagaaaaattaactccaatttgcagacggaataggaggaatccctttattaaatcacttgctcctagttacaggttataaagatggcaaacctgggaagtaaagacaagagtttatgttataaaaggtagaaaataggagtggttttaattctctcatcacttagtgaccttttttcttttcttttttttttttttttttctgagacggagtttcactcttgttatacaggctggagtacaatggggtgatctcccctcactgcaacccgggttcaagcgattctcctgcctcagcctcccgagtagctgggattacaggcatgcgccaccatgcccagctaattttgtatttttagtagagacagggtttctccatgttggtccggctggtcttgaactcccgacctcaggtgatccacccgccttggcctcccaaagtgctgggattacaggcatgagccaccacgcctggctgacctttttacaaatctggtaggtttcataaattttttccagggtattttgctagttctcagaaataatttattttggttgttcagaccacagtcataaattagtgaaggcagcatatagaactgaaatttagcacccaacacaaccccatgattcatgctttcagacaaactctagcacagaatggataaagagctaagatcttctgacctgggaatacagaaaggacagaaaatgtttggacttgtatgtcttcaagctttgtttagtcaaacagtgaaacatgtgtacacttaatgatgaacagaattagtaatacaacccagaaggcaaagcgcacagtgttgctgaaatcataagcaaaagatatgttcgactaactcggacccttgcagagatttgtcaaacggtctgatcatccgaaaaatgccaactgtgacatattcttgactttttaagagagatttacagcaatctgctttaattttgcatattcatacttggactatggtggtcctgcttcatacatcctctaactggttagcctattcaaagaaaagtacatttgcatttcttttaattttaccctctcctcttcccatacctaggcagtgttatgacctattagaaattctgagttttttgttgatattaaaacatttatataaggaaactcaaggtgatgatacttaaaagccaaacatcacctggcatctttaaactggtatccatggtcaaccttcacaaaatgaatgaaccccttaaagcttatgcgagattgtgtttgcgtgtgtatgcgtacatgtttccagggtgaggattctttgctacccatctgttctctatcagtcataccaggcaggtgaataactactggatctttaaatgtgctatttgtctacaaaaactaaatatttatattttcataatacattttcattctcaaagataaaatgaacatatatattaacattaaaatacgtaggtttgctggaagaaagcagagcgtaaaaccatacggtgctatgggttttaatagcatcctgtgaagacctatttgcattctgaaggcagtgactgagcagtgctccactgtggagggaatctgggtgatgaatatggcctcagtggcaaaagacagcttttaagctaatgccttcccaacatacttcttaatgttctatgtaacttaattaaacccagaaaccactagtatctcttgttacatacttcccatttgtatgtagcaagattttatcgaacttggtaaacattcagaaggtagggaagtaatagtactgagtggctttactgaaagagcatgtataccattcagcatagtttataagattttgttcactaaatgctaattctctcattttccttcccattcactatctgttattgggtttgcccttaggagtgcccaagctaatgagtccccctttgctcaccaatgtatacagaactcaactaaaaataaacggatggtgaacaaataaataataaatatgtaagtatagagcaattatttacttttctgaaagatgatctttttggcctggcagtctttcaacttttaattccattctgattagcttcataaaattttggttaaattcaaaacctgctggtggaatgccttaaacattataatattcatctgtccacataccaagaactcagcaaataatttttaacttactatcagttacattgaggtacagatgtcccatatttgctttggagatatatgctatatacatatattttataagataatttcttttgcaacgaaaagtgatgggtagaaataattggtttgttgggtgaagggcaattagcggtatcatataaaagctcaagtttagtaccacaatttcttttttgctttagaaaagaaaggtacaccaacacccacattggttaaagtttggtttagttgtaatccacatcatatagtggcgaaaaatttatttatgaggtggtttaaaccttctcatgccatcacctgtttacctgtgacaaacctcccattaatgtctacccttgttatctccaatgacggctgtttcttgttgaacatttattgctcttctgctggaatttaccaaatagccttgagcaaaatctcaacttagtgatgaaaccgtgctctttaatgaagagtctcacagaattcatgttctatcaaagaattatgtgaagaagtttccagagatctcagcaaaatttaacatgtggctgaaccattcaaaaatgagaaaccaaagaaggatgccgatgctatagaaactgccaacattttttttttgctcaattaaactgatagcctgaatgtgaagcagcagatagaagcatgaaatgaatttcagtatggataagatggtttcaatcgttaagacactgaaaaaatccaaacaacacaactgggatagataaacagatgtacaggaaaatgtttcctaattctcacttccctttagaaaatgcagttgttgaagtcagaataataatcatgataactgtctgatgaaagatttagactaagtatctgtaaaaacaccaaaaatctcagaattacaaagaaagctttggctgtgtatcccttatctttaaaacagttcaagtcttacaaattagggggtgctaaggttttccaaacctaggcctacaatagaaagttgattgaaataaaaaatccctatctggcctttggtttaactgtacaggatcacattaagtctaatttctcttcaacagtcaggacatatcatcatcttctgtctatgaaggataagcagaacgctgagagttacaaggggaaaggctcagacagcatttagttcctgtttcatgaagctatgaatagtttgagtacgagccctgacaaagtaaaaagcaggaagtgcatgactgtagagggcaggttaagaaatgatgaatgcttagctttaagtatttaatctggtagcttgcaggcctccaaaggtggtagaagttaacctcctgtgctgcagttctggagaggcatttaattcttccagggggaaaaagtgctaactccttgattttccaaagaaagtctaaggaaagtaaaaaggtgaaggggttggtgtttagaagagtcactagccttcaacagagtaagagttttttctgagtgcaaagacacagctctgctcaacttttttttcccatggggaaaacaactattttaataattgtaatatttcaagtatttatctcattttttaacttttaattttggaacagcgtcttgctttgtcatccaggctggagtgcagtggcaccatcacagctcactgcagccttgacttcctggttcacactcacacctcagcctccagagtagctgcgactacaggcgcgcaccatcatgcctggctaattaaaaaaatctttttttttttttttttttgtagagatagggcctttctatgttgcctagggtggtctcaaattcctgggctcaagggatcctcccacctcagcctcccaaaatgctgggattacagctgtgagccaccacatctagcctaaagtatttattttaaatacatgtgcctatatatgtatgactctaaatatgagtcaaacaatgcatttttaggttgaccattcagtgtatttgcctataggtacataactaaatcagaaatttgaaacatacagtatactcagacacagggactcaggaaatgaaattcattagtagaacaaggaattctagctgcacaaaaacaacatctcataacacttccacgtttaggtttaaaaactgagtaaaagtatgatttaaatctgagcttcaaagaaactgaaaacaatccacattgttttggaatcccgtgtttgcaaagtctgagaatatacggtagaatttgttaagggttagacaggtaattattctaagtggtaacatctacagaatctatggaaacgacacttttgatttacttatattcaaataccatttactgaatacagttgtctgcattttccaggcacggtggttaagtatgagggagatctcagaaatatttatgtatgactcctattacaagatgtgatctttttcagacaaccaccagtaagctctggatttatgtcttcaagaggaaggtataaaagtcctcaagaaggcatttaattacgcctgcaatctcagcactttgggaggcggaggctggcggatcacgaggtcaggagatccagaccaacctggctaacacggtgaaagcccgtctctactaaaaatacaaaaaaaaaaaaacattagccaggcatggtggcgggtgcctgtagtcccagctacttgagaggctgaggctggagaatggtgtgaacccagaaggcggagcttgcagtgagccaagatcacgccactgcactccagcctgggcgacaaagcaagactctgtctcaaaaaaaaaaaaaaaaaaaaaaaaaagaaggtatttacaattttcttgtgcctgccaaagtgcagacctaagtgccaggtcaagccatacaacattaaaacttaaatgaacacctaaagatggtaacttaacaaaaatggcaagtaatgccccctagactccaggcctgtgaccacccagccacattttattacaaaggaaagatttaaaggtgagtcatggtggctcatgcctgtaatatcagcactttaaaaagccgaggtgaaaggatcgcttgaggccagaagttcaagactagcctgggtaacacagcgagaccctgtctttacaaaaattttttaaaaattagccacacatggtggagcttctgtagacccaactctcatgaggctgaggcaaaaggattgcttgagcccaggaggttggggctgcagtgagctacgactggaccactgcatgccagcctgggtgaaagagcaagaccctgaaaagaaaagaaaagaaaacaaaagaaaagaaaagaaaagagaaaagaaaagagaagattagagaagagaagaggggaggggaagagaaaaggaaaggaaaggaaaggaagggaagaaggaaggagggagggagggaaggaaggaaggcaggagagaaagagaaacagagaaagagagagagagagagaaaataaataaataaataaataaatccgagttaagaatttaacaggaatccttagatcaatcaacaacagtgatctgatttttgacagtaaaatatttcttcctaatccagtttttaatttttttttcaaatgaacatgttgcctaattccatatgaagcaatgcggaggcccacaataagcacgattacaaccactctaaaattatcccctttgataaaagatgacacttcggcaaacattcttgccactgcctttcctgtgatggctgatgagactaaactgagagtttaaatgtacatttgttaaagcctccattcagccctcagcttatttttagtcccatcaatgtccatttagcaaagatcttactttagagattggactttcagctggaacgcttcacaagtttctgctataaagattctggtctcagcacccaccagcctatccttctctggcaaatgatcacacggctcctctcctgaaagcgtgttctccaaaaaagagaggaaccaaggaacttttgttctgcagagatataaaaaaaaatttcctgacaagtgccttgctaagatagagaattttggcaaatagaaaatgaaaacgctaatatgaatattctttttcaaaagctctttgtttagagaggaagctcgttctagtgagaaggcaccacagtgactcgcggctctaccctctcccttcccagcagtgtcaccctgaaccagccgctccatctcccgaggttgcagtgatatcatcggtagaacagggtaaatagtatcttacgtcttggaagaatgccacgagctctttaacggctcctcatggctttctgtgcactgtaactttatccatagaaagaaaaatcaaaatggtgaggaaaatcggtgcaaatgggtgactttctggttaagttgcataaaatgcacaaacaattccagccaagattgagtgagaagaactggatttaccctcctgcctgaaccaccaataactggacaatatattcatatacaaacagcgtttcttttttttttttgagatggagtcttgctctgtcaccacactggagtgcagtggcacaatctcggctcactgcaacctctgcctcccaggttcaggtgattctcctgcctcagcctcctgagtagctgggactacaggtgtgcgccaccacacctggctaattttttgtatttttagtagagacggggttcaccatgttggccaggatggtcttgatctcttgacctcgtgatccgcccgccttggcctcccaaagtgctgggattacaggcgtgagccaccacacctggcataaacaacatttctgcaagacattagacatcaggtgaaggacactgattcctgaaaaggggaaacaaatgaggacttacagctgccaaactcatggccctgaatttccaggtcatggtttcaggtggggaaacccacacagagcctagaggactcgtggagtggaggacatgaagtgtgtggagagatcaaggtagttgtaattcacaggacagggtattggtgaggagagagttgctccaaaagagaatccagagatgtgcagagtgatccctgagaatatagctgagtaatgatgggtacatgcatgtgaaagaaactgaagccagggggaaaatcaccaaaaagaattagcattaacagtgcttggtgttcacacagggacaggaataatgcctcttcccacgagtcaggtgagaaaacttaacattcatggtagatgactgagaagggtcttgcctcactagtaaggaataactagtcctaggctgataactgcttctatcccacctaacaaatctaaaaatgcaaagctcaaaaggatcaaactgtttccaagtaactcaactatgtgacagaaaaaagctcaagaatattacaaaaacacctagcattcaacaggtttaaattcagcgtccgacatttaataaaaaattatgaggcataaaatgatacagggaaatgccacatgtaataataagcaatcaaaattgattcaaagttgacagagatgttagaattagcaaacatggatatttaaacagttttcatataataactgtattccataggttcaaaagttaagatacagacgatattatgggtgttgggggtagcccaggttaaatttctatatacaacaactacagtatgtgaggtgataagatgaaaaacggccagatggaattaagggcagactgaatgataccatggcatatcaaaattaaattgttaaaaaccagtgatatagagaaaactgtaaaaacagaaaaaaaagacatgttatttttagagaaataaagataaagatatcaacacaaataagacagcagagtatcatctttcaggcagtgaaagagaaacctcaatccagtattttttacccagcaaaaatatttttcaaaaccaaaggtataaaagggacatttttggtcaaagccaaacaaagatttcatcaccaacttatgtgcactcaaacttttttttttaaagagacaggatgccctttgtcacccagatgggagtacagtcatgcaatcacagctcactgcagtctcgaactcctgggttcaagtgatctcctatctcaacctcctgagttgctgggattgcaggtacaagccaccaagcccagtctctaagacattttaaaggaaatctctcaggcagaaggaaaatgataccagctggatctgcgcaaagagtttacagcacccaaaatgatgacttcatgggtaaacatgttgttttttttttaaatttacaactcattaaaaaataactgtttaaagaaaaacatcaacaatgtagtaaggaaaaagtatgacaacaaccgcttacagagagagagagagatgaaaaatggaagtacttttgtaaagtactgtctgtggagtggtataatatcatttgaactgacataacatcatcgtgacaagtttagaatgttttctataagcctaaagcaaccagtaaaataacaaactagttataacttataaacccacaaaggagataaaccagtaaaataacaaactagttgtaacttacaaaccaacaaaagagataaaatagaatcataaaaaatttctaattaatccaaaaaaaaaagaggaaaaaagaagaacaaggaacagactggacaaatagcaaacaaatatcaagatgacagattcagtgacaaccatatccataacctcattcagtgtacatggtcttcccaatccaaaggaaaacgcaagacccaattacatgctgcctacaaaaaatacacttcaaatataaagacaaacaaggtcaataagagtataaggatggaaaaatgcaccacattaatattaatcaaaagaaagctggaatagctttattaatattaaagtagattttggagcaaaacattacaaaggataaaaagatcatttcataagaagaggctcaaggagggcctaacagcctggaacatttacacgcctaaaaacacagcctcaaactatacaaaataaaaactgatagcactgtttagaaaaatggcccggtccacaatcacaggcagagctttcaatatcccttgctcaatgacaaacagaaagaacaaatggctgggcatggtggttcacgcctgtaatcccagcactgtgggaggccgaggtgggtggatcacctgaggtcaggagttcgagatcagcctggccaacatgttgaaaccctgtctctactaaaatacaaaaattagctgggtgtcgtggctcacctgtaatcctaggtacttgggaggctgaggcatgagaattgcttaaacccaggagacagaagttgcagtgagctgagattgcaccactgcactccagcctgggtgacagagtgagactccatctcatttaaaaaaaaaaaaaaaaaaaaagaacaagtggacataagttacacactcatgctcagaaagttccttccattccaagtaagctctcccacagaatgccggtgaacacatctatgcctgtaccactcaacatgcctttttggggcaatgatcactgaaaaccatgaataagtctcatcattgctaatgtcatgactgacaaatgcttccccacagagaatatggccactgctctgagatggaaatttgagttctaattctttctggtccactaaaaattcttacaactcagccaaatctcaactttccttgaccttagttatattattatacttacatgatgagggggctgggcaaggttacttctaaaatcctttgccatggtctgaatgtttgtgtctctcccacccccaattcatatgttgaaacctaagccacagtgtgatgctatttgagggtgaaagctttgggagacaattaggcatgagggcagagccttcaagattgacattagtacccttataaaagagggcccagagagctctcttgcccattccaccatatgaggatacagcaaaatacaaacaaaaacaaaaataaaataaataaaagataaacaaaatttaagttctatgaaccaggaagcaaactttcaccagacaaccaagtatgctgatgtcttgatcttggacttctcagcctctgcaactgtgagaaataaacttctgttgctgataaggtacccagtctatggtattctgttacagcagcctgaagggactggaagacatccttccagcttttgtgttcgaacttgaactatgccatcaattgtcaccacctcaggaatattaaatcaagtcagggcttgcaatgtgagtccctgggagtcctgtctggctgctctgtggggaagtgtgagtacctgctgtgtagagatgaccttgtggaggtagctgccctgtgaccctttgaccttcaagatggaatggacaggggttgaacctctgaataacagtgctcaaggcatttctcctcattctttttgtatggcttccagttcccagtgccccacccttactgtctgtgctgtgacctgaagtgtgaactcggctgcagcgagacctacccgaggaggaacagcctgcagagcggtgatgtagttctccagggccaggcggcggcggtcattgagcatggcttccactctggccatgtgtgtctccaccagctgctgtctctcgttggctgcttcctgttccaaagattccactttctcctggaaatgctgccatcataaacacatatgtccatggggactgaataagtaggatgaagcagcaatttcaagtcttctaaaaaagacatcctattccattttcttctagtgctaaaaagtatcctaaagactgcatagtcattccaacattgactaattctacgttttatagcttacttcactttcttgcactctccaaccctcatcaaacctactttctcattgaaaatcagtatttcataggctctctgaaggctgatttgactaataactttggataaatatatgcactcttgaaactcttatattacatattaaaaaaaaatccctctcttactaacagtacctcaagtaattgaccataataaactgttggtttacttaaggtaattttgagactggtttccatcaaaaattcaaattctcataatttttgctggagggagaagcagcagaagattgtggtgactgaaaagatgtattattaataaaaagtagattgcaagttacaatgtgagttttatggcaatgaattataacttgaaataattgggagcaaatataaggcaggatttaaacaactcaattactagacaatgattaagaacagctgaagttcatgggactatgaacaatcacacgtgaggtgctggcagataaaggtaaacctgcagacactcattaaaaagactgctggcatgtgatgtttggtaggaaatgggttcaggttttacctggataactgccttcttatcagctttaggcaagttctttgcttgacgttctgcctcttcccattctctcatgacctataaattaaggaaacatttgaatttaaaatcatcagttcatcctttgaatacagacttaataggatggatgattatgtttttcctctatttttgtcattttagatatttaaaaaatttattacataccccttcctatctgaagaatatttgacctcccactaggatataaataattaatcacagcagtatattaaacataaatgttcatatttattgcaggaatatagctttttgagtcaaggttggtctttttttaccccgagaactgacagtcatttgatttgatgtgaacaaataccaactattcatggaaggcacacattaactgaacaaggtcttccaatattaaactgaacacctaagttttactctcttatgaaagcaactgaaaccattttaaactgtatattttgactttaaagaaaatatgacattttatgtgtgtgtgtgtcatgaatacaatgccaaaaagcagtacataatgggggaagaaaaagaagacttctgctgtctaatatcctaagacctatccccctttaaagaactgatggggaattaaggccctttgagcttgccaacctaagtcatgaacagcaaggattacgctaagtccttccaaaaactccaagaaaacatgtaatattctgaatgcagcaaacatgtatttttttacaagtagcactaatttagtaaccaactgctatggtttgaatgtaacccctaaaaagcatgtgttggaaacttaatccccagtgcaacaatgttgaggggtaagtcctgtaagaggtgattcagtctctgtcctcatgagtaaattagtatcattatggggggagtgggtttgttattgtgagaagtgggttgttataaaactcagttttgccctcctcttgcccttcttccttccaccatatatgatacagcaaggaagtcctcaacagatgccagcaccatgttcttggacttccccacctgcaaaactgagagccgaattttaaacttctttttctttacagattatccaggctggggtattctattatagcaacacaaactgactaagatatcaggtgaatgtgttttgtaggaaatcaatgcttcctgctctcaactttgatgttcacctggatttccctgagagaagttcactcattaacctgatacaaaaagtaaaagtctgcacctctgtatgttgttcaaagaaaatattaacttcctaccacctacagctgccttttcaagtgtatgacaagtagaatttgtttgaagtgcaactctgaactaggtaaaatgaagaaagatcaaggaaacaaaatattggtttggtgccagatgtgtacttgcatactctgtgtactcccaaagcatgagaaaacttgattactgtattataagagcctgttttttgtaggtacttagccttaaggaatagactcttctaacatacttcaagatgggaaagaaaaagaggcttggaataaataactatagatagaagacttctatgagacaatactatatcaaatcaccatgtgggttcctaattacagattttattgtccattggcattcattctttgtatatgataggcaattagcttcttcttgttgtttttgtaaaaccatggaggaaacaagatggaataaatatttcattacacttgaaaagcatatcaaaaataatctcaaggttcacagcaaaattgggacaaatgccctgctgcaatgaacaagaatagaacatggaagaaaagaaacatattgtcccatctgctttggtgcttctaccacgttaataaagggaacctgtgggcaagggggaaatggaagaccatctttgctttatagatgagataagccttgcaatataaatatttcaatttcctgctttgggaatgttcacagtggtggtactctaccaacaattcttcaagcaaggaatctcaaaattagtttgagatagaagttcaatgttctactgcaatgtgagaactgatttcccatattacatttacattttttccattttacctcatacactttaagaaactggactttaagctttaagctgggggaatccatgaaataattaaagagatttatttagctaatgagttgcaaataagcattactatagaaattaactcacattttgattttcagaacaatttaacaatatcctatacccccacaaataaacaaatcacctgcaccatcccactaagactctactgcaaatgaatacacactatatgtaggctgaccatctccctgtgaacagtgaatttcactgtgggactgataacaagtagcattactgctgaccctgtattaagagctttacaaaatctatctaatttaattgattcctcacaacagcttgtgagattagccagggccatcccattttacgaaccaggttaaggtaccagctcgaggctatgcaggtaaaaaagggagagggaagaatataaaccaagatctctgtggctctaaagatcatgtttttgtaccctgtggtacccaattttttattataaaataaaaaattcattaggtgagctaagtttatttatatttagtgacaggagaaaggggcgctcttaaaatgttgctgcttatcttaaaaataaaaacctaggccaggcacagtggctcatgcctataatcccagcactttgggaggcccaggcgggtggatcacaaggtcaggagatcgagaccatcctggccaacatggtgaaaccctgtctctactaaaaatacaaaaattagctcggcgtggtggcacgtgcctgtaatcccagttactggggaggctgaggcaggagaatcgcttgaaccagggagttggaggttgcagtgagtctagattgtgccactgcactccagctgggtgacagagcaagactccatctccaaaaaagataagaaataaaaacctatgagttgggtcagctttcaatttgaaggacttcattttaagcatatactaaaagtagtaagtttataagtaataaaagtgctcacacatggttcagctgtagatttctatttgactagatgctagtcacgacatatagcaacaaaaatctacaggtttagcaacaaaaatctacaggtttagagttatactccacaatggcaacaacaaaccaaaatatgaaaaaattccaaaatcctctgtatttgtaagaaaacatataacaaaaactacaataaaacttaatttaaaaaaccgcacaatttttaaaatttaaaattctcaggacctggcccttgcagtggctctatggattcttataaagcaattttccactgcaggcacaaaggtatcaatttcatttggatttatcaatcttcaaagacttggctgtttcatgcagagaaaatgactactactaagtagagatttaagaggcaggcaagtttaaagttgaaaagtccctagatttcagcaccacagactatgaagatacatattgatttcaggtgtctcacattcctatgaccactggaatctagtagacaacattctctgctctgggacaacatctcttaggttatatcagatatatctgatgactaaaagatgaacaaaatctacaaaatcatgaactaagtcacaagttacacagatgtgctaaaagttaaattattattttaaagaagacctgtcacatctaaaactaacagagaatttgaaataagttttcttaataaggtcaaaaatgaacaagatatactaggagaaaaaatccaggattaaaaaaacacacattaaaaaaaatgctacagtgggtccacgatgaatgcaggtagcaggcttcatgacttgaggtctcaaggtttctatccagcttggaaagataatgcaggtgtgtccagaaatcactaacaaaaccggggagcaaatatttagaattaaatgaaaggtaagagcaatgactgcctgtctcattctgagtatgaagtggggtgtaaggaatgggtgagatgtgtcagcgtgaagaagagtgggagggcatttccagaagaactcaatgccaagggcaaagggaagcccaagatgagatgaacagacgatgagcagagtggcctgatcagaacagcagcttaacgctgtacagaaagcaagggtagcagttgagaaggaagaggtggtaggaagaccagagtcagggtacagtggtaggcgctgaaaatgacaagctgagcattcggtgtttatttttgtcattgttctttttttacgacttcatgtgcccagaagtggatttgtgagggcacaggaagcctctgaaagcttcataaagaagggagataggatgtaaattcaaatgaggacatttcagtggcaataagtatgattcatagtcctccaatgctttccgaacagtgcctgtgtctttcctaaggaaagatctgattttcttggcatcaggtgaaaacttaataattccctgtggctagctttctagttcaattagctgttaggttttcatcgtgggcagccactagaactgcacattatattccagagccaaaagtactgtgattataaggcttttttcctctttatgttattataccaaagtagatccaagtattgttattcatcttaaggcaaaacaaacaaacaaaaaacaaaacaaacaaacaaaaaacagtacctgtgttgtacctttctagataaactattagttttatgttttcaagggtagattttcttattattcaggtgaggccaagaggtcaggagatgattatcatggaaaagacagtttgttactcagctcccaagaagccggtacatgccactacatgcagggtcatatgggaagcaccagggttggtcaggaggggaaaacatgagcaagagccttttattgtggttttcatggaaagaatgagcgaagcagggtaggcgggtttaggactgattagttcaaataatggtgatggggcatgaggttgtccctagtggtctggtacctggtcctggggtgattagagcaggtgaatagtggcccagagtataagaaggtggttgggagtaaggagcttttgattgactggtttgcatgggaaagacatgctcaggggccattcatttggccctgggagggaggaatcttcctggggtcagcagggacccagatcagaaattacaggaaagattaattgtctactaaagactgactgtgatcttagaaaatacgcagcagtctaattcataaattgcatttaatgtctctcaagagattaagcatctgtgctaagacaaaaatttctcctatcttctgatatttgccacagaatattaacactaaaaatgaatggcttactttaacctgagatctttattcattcacttttatgtcctacttcttttccccccacattcactcctaggtttgtagactacaaatcagaaaagtgactggaaaataataagtccatatttgttgattgaatgaatgaatgaatgaggaatctgagcaagggctaaaatcctccatattatcaaactccaatacaacatccagtgcctggtagcagacatagcttcaattgtagttgatagtatatatggattagccatgttttagacataagttattttttaatttgcttaattaaggacctgctaaaaaaaaacaaaccaaaccaaaacaggttttttttttttttttttttttcagcaaagtataatgaaaggagtactgtactaggagcaagaaaggcctggattctaaatgttgtctctggctcactgattttgctttgtgctaaaatgggaagccactctctcgaacctctattccactatgtatcacttaggagactagatgaaataatcactatggttcagctcagttttaagtctctatgattttacagactgtaaacaatcgtaggttcacaattataacagtctgggatttaatacaaaacctcatctttactaaagagcattttgatggattttaatttacaacatgttgattacaggtactacatatacacagaataataatgccaagtacctttcttcgccagagagaatgttacagacatcatttaatttgtgcttacaaaatccaactatacctggatccttcctaggcagcatgttcacggaggatgcaaaaaacccacaaactgtgcccacacagtaaacatttaaaattagaactttacatctttaaagatcttgataaagccagcaggcctgtggggagactgaggcagaggcaagctcaggtttcccaatatcgtagggctgaatgatggaagagccagacttacctgggacattctctctcggtgcttggcctcaagcctctctttggctttctggaaatgggcatgttcattctcatccccaggtgtctcgagatacttgtcaacggcatcaggggtactggctgctgttgtaggaactataaagtagaagagaaggaggtttgagaaaaaaaagccaacaacaacagaataatccactcgtttaatagaaagccgtattttcagttatttctcagaacagagaatttagtaaagcagcgcatacaagacgttaatgctgtttaagagaacaccatgagacactgtgcagcacagtaaggatgtctttcaccactcccaagtacagaatgaaggaaaaatctttaaaatggtccattttgcaattatagcattagagttctttacgaaacaagcatgcaaagagcaaaaacagttggtgctgaagacatgtttttccaaatccccatgctttcctaaattactattttgcaattttgaaagtaaatgatgatatcatcaatatcatacactaagactcctgcagaaaccacagatatctgtaattagcctgttgtagaataacggcaccccagggaaaaggtaaatgtatgatgtatttagataactgaattacgaagacaaccttcatgagacagtatggaaacacgacaaaagatatataaacatcaataaacacatttttgaatcacaaaaggacttttctgtcttcataaatttgacaatagtcaatgaattcattatgctagttgtcaaaaagaaagtgatttctattttgaattcaactaatactgctaagcaatatttgaattgcaacatatactgctatattatgtaactcatgagccaagtgaattataatacctatacaagcaattttccaaaagattagtgagaattcagagtatttatgagcttaaaagcaaaaagaaaaaagaattttgacttaagaggaagcatatttaacataaaaaacaaaatgagacgttttcactatcttttgagatcaaatcaattgtttcattcaaaaggttattcaaatatcaccaatgttccaagtattcctattgaattattacctgtgtattacatttgggatataatatctcaaagaggacttcaatgagaagaattgatagctaagtcattttgaaactaaacttgaagttaaatacgttttctacatccttcaagaaaatgtctggaatcttaatccaaagtcttcaaagatattaactaaaaccggaaggctgttaaataattaaacagtatctttcattttaaaaagaaacattcgttttgattttttccctccacttcaatcctgattaataatcatttttcaaaaaataaaagcagttgagtgtctatccagatgttgctttcaagtggaaggaaggaggcagggcatattcctggtgcctttacacagctgcccctgtcttctctgtagcaaatgagggagtggtgttccttcttacattggcagcaacgggggaaggaaggaaggaaggaaagagtcatgtggggatttgcaattaagcacatttggatttgaatcccatttctttttcagatcagctgtgacctggggcaggaaacttaagcactccatgtttcaatttttttatcaagtggtgataacatgccgcaggacatgataggagagctgggaaaatgagataccataccacatgtaagtcatccggcagagagggtgacacacagtggagctcatacatgttagtggccttccctcctcctctgcttaatacatcctgttcaaatctcagagctaatgctaaccacgggaaagttctgatacttttattcaaagccactgaaaatgttttggtagaagagtgcaataataaagaaaaaaaagaaaaggacaagttttaaaattttaaaaattgagaaaaagaaacaaaagaaaatacaaactaacaaaaaataaataaaatagaaccactgaaaatgaattacacacaggatcacaaagtgcaacctacaggaaaagcagtatgtatttttcaaaaaatgttaggtgtagcccacataaaaaaggccgaaagtatcaaaaataagtaaattgttaatttgtaagattgaaacaataattttgaatattaagacctttttggaaaaaaggtaaatgtttttctccatagcttcaagcaaaccaatatgcaagtatttttaacttaatcattaagttaaaatgaataaatgctaaataccacgttcttactgactttaacttaatgattaagttaaaaatacttgcatttcaagttcccaacttgaaatgaacatggtatttagcatttaaaatgtgcttccctagctttagtcatcttctcatcttaactggtagagctcaaatgagaacaagttaaagtaaaagcagaaaataaaacagtaacattcttttgcatagtccaatctggcagaatgacatgtttaggcaaaccatattttatgtttgaaacaaatgaaaatgtataaatatttggggttatacctgctgatgaagatagtcatctggctgtaactgttataaccataacataagcacccctttggaaaactggaatcataaaacttactatataagaaggaaattttttcagctcctatggtttgcgaacactgtctactgtataaaggaaagaagataaacactataatctgaatcactataatcagattggcctaagtagaaatgcacttagcaacataataagagaataaccatggaacatgaatgtgaggtatgtttaataggactgaggatattaaaaaggataaaaaccttctttttaggcacgtggaaatgaatatgaatactatattaccaacttaatccattgaatccagaaatatttctgtggtaattaattttctgtgccaacttgattgggccgcaaggtgcccagattaaacattgtttctgagtgtctttgtgagggtgcttctggatgagattagcatcggaattggtgcactcagtaaagtaaatcaccctcctcaacatgggcaggaatcacccgatctgctgagggtctgaaaacaaaagggcagaggatggagcagttcaccctttttatttcctggctgcctgagtcaggatattggtcttctcttctccctggactgaaatttacaccattgtcttccctggttctcaggcctttagatttggactaaatcataccaccagctctcctgggtctccaacttgcagacaacagattgtgggacttagcctccataattgttgtgtgagtcaattctgcagaatcaatctcttcctatacatatatatcctattggtcctgtttctctggagaaccctgagcaatacaatttctcttcaagtaaatctttgttaacagtcccagttatttcccatagttgaggaagctgtgtctctttttatctttaactcaaatttttcagccattcatacaaactccccatctcaattagtgtgagtgaaattatcctatattcataccaaccagcaagccagattactgtctagtcaagcagagaaggatagcatatgctgatattgttaaatgaatttaatagttcattactactgctctgcagctggtgaggatcccggaaggagagagcaattttaaggtggagtatgtccagagagctcaacttctatttcgtgaatatccttatatcctaaagagattaaattcataggactgactaccattttgtgattatgtccacagaaggccagagacacgtgtgccctatgtcctcacccatcaaggtacttccttttgggaagggagtggggctcaaggaatgtcaggatatgtcacaggacacagaggaaacaggaagctgtatatcagcaggtcactgatatatttaaggtacttaaaacacaggtcactgtaaccacttagaaagtggaaacaaactggctttaggagggtttatttctggttttgcattttaaactaccataaagcagtttatcctgctcacagacctctgagattccacggaacctctgataaaggctaggatttcggccggatggggtggctcacacctgtaatcccagcactttgggaggccgaggtggacggaagtttgagaccagcctgatcaacatggagaaaccccgtctctactaaaataaaataaaataaaaaaattagcagggtgtggtggcgcatgcctgtaatcccagctacttgggaggctgaggcaggagaatcgcttgaacctgggaggcggaggttgcggtgagccgagatcatgccagtgcaccccagtctgggctacaagagcgaaactccgtctcaaacaaacaaacaaacaaataaataaaggctaggatttccatgttggcactccgtctcaaataaataaataaataaaggctaggatttccatgttggccaaatgataacagcctcttttcatcagagcccaccatgctaggcatgttctgtgttctcgtttaatacatgggaagaaaaaattaccctattttattgcgtagaggcaaaacactatcatttaacatacccatttgcatccctaaacacacacaaataaagtctgttaagattgggtaagccataaaaaggctgtaaagctaatttttagagtagtaaagggccaatccatccacatgctggggcactgtaaagggtttttgttgttttgttttgttaatgagcagcacaacttggcaaaacaaccatatgctttgttatgatgtccgttggcttgttttctatgaaacagctgttcctgccccaaacactatctggcaaatccttcaacagaagttgggtcataaagcagggatcaagtgaaagagcccatggagctagaatatggaggacgttctggccttgggtccctccttcagcctgctcactcatgccttctgcaagcaagctggctaggtatgttcccccctccacaaaaacctagacttaaaacgagacaaaacacagggttcaatatccttagctctaggttttgacctctagatgcctagtcattagcagcaataccaacatcacatgcataagcttttaactttttaaatgacctttgtattttagtctcctaacagagccttgaggggcatggtaggatatataggctattacctcccttccttttaatagtgatcatgtgtatctaaacactcataacaaatgaaaaaatgtaacagaaaagcagttctaattcctagtacatcactgcttcaaggtgaatatttgcttccaaatatacagtggcattttggatgactaacgccttctacataagccacatccttattctttgccaccctgggaagtcagaggtatcaaagcagctgagacagcagctctgacatggacaaactatcctgcctttagtgcgcctgttcattcttttattcctccagcccaccaacattgcagcccttattatatgtgaggcacatgggagaaaccaatgagaaaaacatgaaggccctgatcctggtggaattatattctagggaaagaaacaattaccacaagaattttttaaaagccagtaagtcatattgttaatatgtgatttgtattatggagaaaaagaggaaaaagaaaaacagagcagagttcagaaggatcgggagagctgaggggagaggggaaaggtagaccgcagtaagtgagcgaccaggcagagtcttaagtgaggaggtgacattcagatcttcccagctggctgctggaaggacatggcaggcagatgacaaaactagcacggaagccctaagagttgaagctggctggcaaattccacgagacccgcatggccagagctaaagaagcaagagaggaagtagtgggagaggcagggaagaaatgggggacatcatgtacagccttaaagccacagtaaggattctgagggaccagcgtgggctgtttgagggggagtatatgtgatggggcgttttgttgaaggatcactctggctgctatgggacaaaagtagaaggaagatcttttaagaggaaaagacaggctgggtgcagtggctcacgcctgtaatcccagcactttgggagtctgaggcgggcagatcacctgaggtcaggagtttgagaccagcctgaccaacatggagaaactctgtctctactaaaaatactaaaattagctgggcgtggtggcaggcgcctgtaatcccagctactcgggaggctgaggcaggagaattgcttgaacccgggaggcggaagttgtggtgagccaagattgtgccattgcaccccagcctgggtgataacagcgaaactctgtctcaaaaaaaaaaaaaaaaaaaaaggagacaaagatgaaggtggcttggaccagggtggctgtcacaggaggttgttgccctcagcccccttcccacacgagaagggtcagattcccttctttctctcacaccaaaatgctgtattacctcagggaactgaatatgaaaacgggagaaactgctttcacatgtgcgtgagggctcatttcaattttaatactgatacacgcatgcttgtcacaatactgccacttcacactgtgatctattctcaatacctgccagagctctgttttctggggtgaagtaacacaggttagctttcagtttattcataaatggcgatgctgcacccaacgttcctatcacaaaatgctcctccatcactggggccaagacaccaacgaaacattttccatacctgtgtttcctctgagaaaactgttagcatttgaagggaagttactttaaaacaggggaaaacctgctaatatcttcaggatgaggcagacgtcactctcctagcctgtctgaagactccttagaggataatccattaagttgaactgtacatgcactgatttccctcattttagttctgattttgtaatcattgcggagcactccatttcatattcatactaatgtggtacttcacattcatataagaatgtggggtcaaaattaaaggcactgtgaaagattgcccctatcattttgatatgcatttgtttcctcaggcttctggggtgacccataattttacagtcacaatggactcaggacacaaaagaagaaatgacccaccttcaaacagcaatgaccgtggccatctccaacaggccagaaggctgaatgtttccctaaaccaaggcttatgaatggcattcagtcgatatattaatattagattctaacaagaaaattgggttagtctcctttcatcagcagaaaagcaatttatctctacagccttggtaacagaagattaaaacaaattaagacctatataaatcattgccttatcattgaaaatgctatttgataccgacccagcaatgttgtcatttgagatggctataatttaggaaaggagacaaggaggatcatttatatatgagtgaaatataaacttgttagcgttcatgtgaaactttaatcttgaaacatggcagagctttccgagtgccatgcttattataacttaaaaaaaaagtgtctctaaaaaaaaaaaaagtgtctctccattttcctaatttcaaaaatagttaaaactcctaacgcattctacattcaaatatttatcctaaccattaagtccaagatagaggagccatttataacaagaaaatacagtttgtgatcctccagtgtaataccagactctcttaaaaacaaaataacaacaaaagaaaaaacaaaggcattctccccctaatatgcccttgtattacaattttatagtcagtgcaatcatagttggtggagaacactatcaatgcatcacatggacataaggtaataaaaatataatctatgatgtgtttactctagtcaagctacatttcttttttatgtccatggacacatactgacatgggaattttttcaaatatatgaactgaatgtgaaggaacgaatgctggcattatttttttattaacatctattctctattcagcacatcacactaaaacttaaaagcaacctcaagtttgaatctaaaaaatatatgtgaagcaatagcaataactggcgtccagaatgggttaaccttaggttattgttttttgtcaatttgtcagaagctattcttgacttcgttaatggaggcacataaagaaataacctgtcatagctgctcaacactcaatagatgagttcgaaaagtcaaaatcttcaatattgtccagtttcatataaactgtagcagtaaaaggagatggtacagttaacctctatggaggtcttaaggataaagctgatttcattttaccccagccttccagagcaatcttctcctacacttctatatttcctttatatggttatttacctctacggcatatctgggtctcaactcattaataaaattatcaggtattgatagccagtactcagattcctttgctggtgtctctcaaaatacctggcctcgcacatcctggggtcaaaaataactgctgcacagttcacaactgcaaagatacggaaccaacctaagtgcccatcaaccaatgagggataaagaaaatgtggtgtatatataccacggaatactagtaggccagaaaaaccacaaaataaaagtcttttgcagcaacttggatggaggtggaggccattattctaagtgaagtaatcaggaatggaaatacagtatgtattcccttataaattgggagctaagctatgattatgcaaaggcatagagtggcataatggacattggagactcagaatgaggaagagtgggaaggaggagagggataaaaaactacgtattgggtacaatgtacactactcagtgaaatggggacactaaactctcagacatcaccactatacacttcatccccgtaactaaaaccacttgtatccccaaagctattggaaaaaaaataaaaataaaaataaaaaaacctgctgtattaaaccaaggatcagcttgctggctaccttttttttcccccttgagatgaagtctcgctcttgtcccccaggctggagtgcgatggtgtgatctcagctcactgcaacctctgcctcccgggttcaagtgattctcctgcctcagcctcctgagtaggtgggattacaggcgcccatcaccacgcccagctagtttttgtgtttttagcagagatggggtttcgccatgttggccaggctggtctcgaattcctgacctcaggtgatctgcccgcctcggcctcccaaagtgctgggattacaggcgtgagccactgcacccagctgctggctacttttataaaagtagtattatcggaacacagccttgtctatttgtttacttattgtctattgttgctttcatgctaccactgcatagttaagtagttatgacaaactgcatgatctacaaagcctaaaatatctataatctggccttgtatgaaaaatatttgctgaccactttattaaacgatccacttaccctcttttggcaaatagctaaacaacagagcagagacataatgaacattcttttaccacaggtagaacatctctaatctgagaatctgaaatgctccaaaatctgataatttttgagcactgacatgacatcatggtggctgggatagcaacacctttgttctctcacagtgcaacgtacagaaactttgtttcatgaacaaaattatcaaaaatactgtataggccaagcgtggtggctcacacgtgtaatcgaagtacttcgggaggccgaagctggtggatcacttcaggtcaggagttcaagaccagcctggccaacatggtgaaaccctatctctactaaaaaacacaaaaattagctgtgtgtggtggcaggcgcctgtcattcattccagctacttgggaggctgagacagggggatctcttgaacccaggaggcagaggttgcagtgagccgagatcacgccactgcactccagcctgggcaacagagcgagactccatctcaaaaaaaaaaaaaaattgtataaaattatcttcagacttttgtataaggtgtacatgaaacataaatgaatttcatgttatttcatcatgaatacatcaatattccgaaatccaaaatctgaagcacttctggtcccattttagagaagagatatttaacctgtattcaaagtagatggcccttctttttaaaaaatgctgagttgctaagcaatccagttcctttcaattttagggtcatctctaattattatggctttgaagaaaaagccattcttcctatctaagcatttccagataccaaagatttagcttttcacacttgttaatctgatagaatatactggcactgacgtgacaggtagtttaattcaccatcacatcttttaatgctttaaaattgttctccctccctaggttggttggggagcaaagtgtaatcccaggttgcctaatctaatttggcagttttagttccaatggtattgcagaatgtgctaatgggaactaacatttgctactgcacagtgaaaagaacaagaatagtgtgattaagaacaatagttcaaatttggccaaagattaaatggcctaggcattcagacttctgtcttatggctcctgtctttacaacgaccctggggttaaggtggcatattccattgaaaggctgcgtggtgtgagttttctacgatttgaaaattatgagcttctgcggcaacaaacttggaacctggggatggaacttggggcctgacttgttaagttccaattcttttcatattctctgtaagtgtaccagtctgtttcatgtcatctggaccattctgatgtgcctagaaatcaatctttttccctccctcaatcctgcatggggtcaggcctacacctctgcacaaactataaggccatcaaacataatcctaaagtacaaataacctgtgtagcaagactataggacatctctacagatggttgtcctccagcatatcctgggattctaggaaactaagatgaaacagagaggagaaaggggtggtgcataggtgaaccaatgacttcaaactaagggatttgctggtttctcttctgctgccacagtagcttacattagagcaggaaaactacgagaccttcaatactatagtcaggacagcaacagcaacttccactttaccttgcaaatattgagagcttggacaatagtctaacaaattcaatttcaaacatctgtcgagaattggatgatgctgacattctaacatttcaacatgcccccaaatttgtggaaagtacacgtgtttacaccaggagagttctatctctgagtcagatgtggggaaactactactctagaacaggattctcaaccagaatgtgaccccctgggcacatttagcaatgtctagagacatttttagttatcacagctggagttgtgttaatggcatttagtgggtaggggtcaggggtactgctaaacacccatatgcctaggacagactcctaaaaattaattatttgaatcaaaatgttaatagtgctgaggttgagaaaccttggtttagttgtttgtaccacatgtcagcgcaaatgaaggagcctgagatgggacacactttggccagatcacatggtgcaatctgctgactaaaaattggcatgatgctctttgagagattaaatgccattaaggagttggtctgtttgccttttgggatgcagtctgatggagacagcaccaggaaaaaatggtcacactctcatatttaaaatataaatgaatccacaaatatttatataattttattgtctacaaatactatattttgaagattaaatgtgaaaccttttgcactgtcctaaacccaaatgggcaggtgcaaaactaatgtcagaaattaactcagctctcgtaagattctttatcccaaatgagaaagggtttttttttaatgatttgaattcctatgttcacgaataaaatgaaagctctcagccttatatttgtggtttagatttttatttaaaataacaacaataaaatatgtccctaaaattgcaatgctcaaaattggtttttatgacaaaagtttgaaacctagaaatgcctgatttatggcaaattattgtttttataatgcaaaccatcatacattttctccctaagtgtaatcttttatcagttcaactgaagagctttttctatctcctttcacatttgttatttgactagaagcagcttagactgagcaacctgtaaaaccaaccacctttgtgcagaaatatcatccaactggctctagattgttgaaggagcaaagtcaagtccaagttgcccagtctaacaggcttgcttaccttctagttcagctccttttctctgaattgagtctgccatctgaatttgacctccagatgaccatgactttttcaaatcaaatgtgcagtttgctataaataagaccacatagctgcacaggctataaataactagaaattatatgtttttttccttgtctgtttgtactagcactgcaaaacccttcacttgctgtgattgaatagtctctgtaggcagacaagaaaatatagctgcccaaagcacttcatcctcctagaatggaaaggtgtcaggatcccaaatacactgcaagtagatggagaaaattactgggaaggagaaaattacaaaagagactttcagtatctgtttggaacagtggatgatgaaagtggtagttacgtgtacagcatgaaaataaatttatcagacaatgatgcttgtttccatcagttattaaaaatggaaaaatagaattcttataaatgctaaaatgaaacaagagaaaaataatcactgttttataaaagaatgggaaagacatttaatttactgatgcgtgctctattcatggcatttaggaaaaaatgttaacattcttcatcctcttttcactgttttctgtattcttaaaatgtgcttctgaatcgcaaatgtgatttcactaaccggcaaaacaatgtcagaaccaatgcttagccatttggtgtggagtgcggccaaaacgtcattttgggtttcaaagcctggtcctgccatgttcgatggcttgggacaagtcactaagctcttgaagcctcattttttctcgtatgtacaaaaggaatgaggaaaatgcccacaaagtgttctgaagaaaaattaaatgatctgtgaaaatgctcggtacaatgcaactcaacatgcgtacctatgtcaacactatagtggaatagctagagctttttcctagtctgtcaacccacttgctgtacttacagtgtttttagagaaaaatgcttttttcacaacagcaaaagaaacgtttatgttgcagcagtacaaaccacatccttcaaaagttatacataatgtgaattattctgaatattttatggaggccattaaaaaactttatagtttaggatgcagtcttttttaaaatacctaatccttcatctataatttatcatctttaaaaaagataactggcttcatcagttttgagatgagggtttttttttttcaggataatgtacacaaatgctaattataaaatatctaagttacaactgaaattgtgcctcttcttccagcaatcataagcataaatggcatatatcatccctaacctaacactggataaatctatttctggatggaatccaaattcaaatatgagtactaaaaccacattttaaaactaaactcgtctgatattacaactgaaataaaaacaaaacataagacactgtaagtaaggcctgcagtggctggacaatgcatttctttataggaggctctttctctacttcctagtcaaaaggtgagcacctctaacctaccattatgccttctgggagaggagaaagaggggttcctaatgtctaaaagtgacccttcatgtctaaagttgaaaccgggtcttataacacacataaattgaaatctgcgtgtacgaattagtccatgtactacaataccatgaatattaagtactttttctgaggaaacaagttacttatgtattatagtctcttgttaaatcatggcatcttgatgtaaccgagtactctattttaaagatctttcttcctttcttttccttccagttttagtaatgaaatggtaacctttgctctctttcttcccaccaggcactccctgcacagcgcttccattatctaattacgcttataattattattaaaattattaatgcttgcttagaagttccactgactgacttaggcaccttcagaattctccctcatcaggagatcacctcaaggctgcagttaatttacaacccgattgtgcgggatgcgccagcccacttaccgaactggataataactcaagtctttggaacaagtcctgtatagcagcacctcctcacccctccttcatgccctgcattccaagctcccctttttaagcctttgttttttaatccaaaatttgagatggttgctttgaggcaggagcctggaccatttccccattgctagctttgctaagtaaagtcactttccttccactgcacctagcccttgttcttcagttctgcaaaagcagtgagaggctaagcctgctctcagttacactgatagcttttaggaaataaaatagtaatggcaaatacaatacaatgatgttgtccatataatattcaataaaaccagactaaataaaaaggaaattggtcagaaatagaagaaacttagtcaatgatgctcttagcccaacatctcaagctgtctggcaaaatcagatgtaattacaagcaaggtaatgggaagaaacattttactaagacaggtgttcaagaaacacaaaaccatgcaaagaaggtgatgatgctggagttatgtgaaccaagcagcatcctcctcccctcttcccttccctcaggtgaatgacaacgtacgtttaacaggatctcgggcaagaggttcctgggtagtcttgagtaaactttgggacactatggaaaaaataagagaacataactaaaaacaaaaagagaaacatgggaatgatggctgaaatgcacgagtccactgacaaaaaaacaacctaacaaacaaaatcactcacttaggtttggtccctccaacaaaaccaaaatgaacatataaacataagatctattttcgtaagaagttaacatttgagaatgctggatattttgtctctgatagtatatccgagtaacaacaggtttcttaacagaagaggatttcttgctccttttgtgccaaatatccccaattcccttcgatgcattttttcacaaaaactccatttatttcactcattcataggacagcatgtggctctcggctctggctgtttgctgaggcttatactctctacttattcttgtccacccatctaactgatcttcagcctttgccttcttcatacattattctgtcacctttcccctctaaaatcaggcatagctagcctcatctaatacatctctgttgggagcatcgaccttttgcaaaaccctcagcaaactgtgtgccacccaggacacctggacaggtgcccactggtcactcccagcccaaactgatcaaagggagagagtgttaggtgaagggatggcagtactggggtgaggtggagagaattttaatctcttgaagcaaattcatcactgctaataattaaaaccaaataaatctcttattaccaaaaactatacatgatatttcagaaaatgaatccacccagggaaagggagaaaaaagttgcaaatctgccaggaaacctctcccaccggctaaaccagtgagaatcactgtaacaaaaggcctttgttccaaaggctgcaggcaacagaattctccattgtgttcgcaatacctgacctaattgactgctttgtttgaaactgaagaagggagtcctttgatccagaagctgcaatcatccaatcagagccagaaaaaaaaaaaaaaaaagcccttgaggttatcagttcctacacctgttcacacatgggactgaagcagtcatctcattcactggcgatggcaggagaccaacaggagcttttccattacattcctcttagatcctgggctcctttacagtgggggtattaatggtgcaggcccttctgttgttttgcttaatcctaagatcttgctgcaaaacaatttatataatccctaggaatctcaggcaggaaatgtggctgccacccttgcaacacagcggagaattaggcaggagtctctcaaaaaagtaatacacagttattgagtttcatttttagttatcaagctgagctgaataattacttcttgagtagttcatacttcctactcatgaacaacaacaacaaataaataaataaataaataaataagcacaattgggaatttcacttggaagtctgttaacgacatggaagtctcacatctggtactggacctcctgagaattacctctttggggaaaatttcatcatgcacttaagtcatcatgacttcatatttttatcccccggaattatgaaaagcttaatgttcaagagaaagactttgaaaattatgttctggcggggtgcagtggctcacgcctgtaatcccagcactttggatggccaaggcaggtggatcacttgaggtcaggagttcgagaccagcctggtcaacatggtgaagccttgtctctaccaaaaatacaaaaaattagccgggcgcagtggcatgtgcctgtgatcctagctgctggggaggctgaggcaggagaatcacttgaacccgggaggcggaggttgcagtgagccaagatcacgccattgcactccagcctgtgagacagaatgagaccctgtctttaaaaaaacaaaaaaaataaaattatgttcctcgagccttatgtcattgaaagtttctcacgttaagtcaaaagttttcttctactttcaagagaagaagcagaagtttgacctggcaaatgtctgtgtgctgagctcggagggggcaagacgggcacttctaccctccggcatttgagatgcatgagctcaattcaatcacattccctcatcagcacaataaaagacatgttatgaaccaacttaaaggtattcatcacagccatacaccttatcaatgcaactcaagctgcatcagccaggcttccagtggtagacagtatctgcacaggtagtgcacatgcataaacatgaacacatatgtacacggacaaacacataagtatgcatttgcagaaacggctggctgcagaagacaaaacagccactccagctttgtttaaaagagaagcactcaaaagtccctctggattgcaagacatatgtgctacagctaggaagagaacacatccatggccatgctttatcagggaaagacggagaggtgtgctcatgattgaacatactgcggagactctgagcaattagagaagtggacagaaatgtggttagtggtagcaacaggcccattcccaagaaccaggaaaatcaatctgttacaaaaagcagagtcagtggcgagagagacgaaaggtggccaggctcgaagaagggtccacttactggcgctgccacacacggccatgcagtactcttctgtgtcaaagttgttccggttgccgccacatccgccgtaaaagaatggggcacacttcccttcagtcacatcaaagtaccagcgggagatcattgctcggcacggccccgtctcggcttgttcagagcacacctctaatcagaggagatgtggggaaccacatttagcatgaaaaggcactgtctctctgttcatgtatacacgtttacttcttttaatcctcccagtggcaacctggactggtttattaggcagcatctaccaaacatttactgaggaatttaactggccaccaggactagagatttacacctctcagagcatgcactgtcatctggtttaatgagtgcaggactcggtagcaataaaaggattccggccaaaggtgaaaagatcatttggctgcttttagatgagtatgaaatgacggaaggtatctgcacatcacaacaatcctccatcataaaaaataaacttctctttttaagaagtcaactttcatgtaaggaaactgctttggttatgaagcgaaagtttaagccctcacaaacatctgattgctttccttaataaatgattgccttaactcaaatataaaattaattgcatatattttgaatgttttccagtgttggaagctgtctgtccattgactttatctggaaacacatgtcatatctgtaaatgtgacttatactcaatgacattaacttaagaccattcatttgtatattaagatatgtactaatataaacggtcttaaattaactctgatttaagaccattttatttgtatattaaaatatgtatttatatattatacattaataatttaattacatatgcatgaagtacatctataacaacgtattattaattctgctatttaattgatatttatatattaaaaatctgtattatttgtatatatttacatacacattaagtacaactataacaatgtattatttaattatgctacttaattgatatttatgtattaaaaatctgtattatttgtatattttgtatatttacctgacccttgggcaggaatgttccaaacaataaaacgcagtcaatcaactccaactgattaatacacaccacgcactgttatacattaaaacacatcttacctgtcaacatgtcttgccaccctccccaagatcagtttcactcatccctgattgcctcaaagtcaatcagtgacccatccaattgcatgtataaagtcaatcctgagtagaattataactctacctcccatgtatatcccatttttattggaagtgaaacaacagcccaattctctctctgggtttgtgccctgcccttgctagactgacgccttagcacacacagatgtcttcttagttttactgacagaggaaaaaacacctttctaaaagatgaaagccacgcatcacccattacttccaagttaggaatattcaacagattctttttttctttttatgagacagggtcttgcactgccgcccagtggcacaatcttggctcactgcaacctctacctcctgagttcaagtgattcttgcgcctcagcctcccaagtagctgggattacccttgtaccagcacgcctggctaattttttggtatttttagtagagatggggtttcaccaggtaggccaggctggtcttgaactcctggcctcaagtgatacacctgcctcagcctctctaagtgctgggattacaggcgtgagccactgccactggtccttcaacagattgattctaattagccaatcaaagacaaggatccatcacatctaggcatggctttgagcttcacaggccagaagctgctctgtcagtaactcagaggggatatggtccctagacccaattcacttttaataaatcagggtgccagtcctttaattttggaagataaataaaattgcgaagtagatgggatacttacgtcaacaagttggttgggtttcatcctgtaagagtattgtgtacagaaatccaatttgctttgggagcgtggactttgaaagcagcagtactgagtgagatggccttaatgatggatgataatgaggttgatgctttcgtagccacgtttccatctgaaaaccacgtgaagagtgtcagatcatcttcatgtccgttgcatggcgcatttctcctgcggagtgtttgacaccttctgggcttagtgctgactgtccctcctgttgacatcatcgtgatggtagccacctctggttttaccagtactttattgcatctactgaaagagcaacgtgtatagggaagtaaaacaatagttagtccccatttgtattgacattgtggatcccatcaactatagccagcagtggtctctgctcccagagcttaccttcagttgtaacaaacatctacagcttcactttgctttccttctctgtatctccttcaccaatgtgtacatattcatgtcacatgctctttaacgtttctaagacacaacaatacccattattaatctcttactcaggcagtgttaattccaataagactgcaaggcagcagtgcctccagagcctgcactgtgccgggaattggcactgggattgcaagcaccgtggtcattgctaccaagggaggcacagaatcccttcaccccatagtcacgggagcattggcaacaaaatttaccatgccttggcaatttatgctgaccctcacattttggcattaaaaaaaagtatcatcttagagtaccaaatatgtgtcttcttatagatgtgtgccacgggcctcgcagtgaacatcacagctctgcagatgcacaaaccttgtctttatgagtctatatattaaataaaagtggtagaattttggatgggtgcaagtcaagtaatgggataaaagaatgatgatcgaaggagatgattcatgataactatgtgcccttatgtgaaacctagcaacaatttcttacttatgataaaggcacaatctccccagtccagaatctaaatggcattatattaacattttcctataccactaattaaacataatgctacattcattttattttcttctgcctcattctataacagctatgaaaccatttgttatagctaattcgtagaagccaggctaaatgagccctaatcaactagaacaagcattcagaactcaaaatccatttacatgttaattaagtaaatagtataagctacacgttgagcctacaactcttgctggagtctccagctgtaagagccttaactccttcctttcataaaggccaagaaaagagtgagttagtccctattcggggagtgttggttggttctcccaatcctgttaggggcagttggcactcttgactttgaacggcccccaagagtttcactgccttggtggagtccaagtgggcatcatgggcaatagcaacagatcccacaatactcaaatacaaaaggctacctgagataatgcggtcaggaatgggtgtaacagtgtatgttaatttaatgtcaaatacataatgtatggagaagatgtacgtgaggctggaagaacaggactgacagtgtgcttttgttacttctcaatctctaagagacagctaccttgtccaactggttctcatctgctgacatggaggatgagcagataggccttctcttaacatgcaacccctctcctggtgaaaaagagcttctcgttataattcccccaattgtcagcaaccctgattccccatcacctcaactctcacttcccaacactttccctcagggaaataatgagaacagcaacttcctacagcagtgaagctgacttcggagaggactgggaaaggaatggaacgtatcctctatcactcataattatattcctactctactacagggaaagggaatgcaactgtttgttttctctgacttttttgctaaccctttattattccagaacaattttccatgtagtagaaaagagaatcttagcctactctgggagaagctgggactgagggtagggtcagcaccagcgatgtatgatgctaatgcttttacacaaagtatgaataagcacacaagaaatggccagtgcctctcagaagtgaacacggagaagcagcagcatagacttgggttaaagcagtgttaagggattaatgtcaatttaatagttgtgatactgtactgagtgaagactatgcagggtctctttgtattaattctttttttttttttttttttttttttgagacagagtctcgctctgttgcccaggctggaatgcagtggcactatctccactcactgcaggcttcgccaagctccgcctcccaggttcacgccattctcctgcctcagcctcctgagtagctgggattacaagcacccgccacacaccggctaatttttttcgattttttagtagacacggggtttctctgtgttagccaggatggtctcgatctcctgacctcatgatccgcctgccttggcctcccaaagtgctgggattacaggcgtgaggcaccgcgcccggcctctattaaatctttcaactgcatgtaaatctacaattgtctcaaagaaaagatttttaattttttttcttttttattatactttaagttctagggtacatgtgcacaacgtgcaggtttgttacataggtatacatgtgccatgttgtttgctgcacccataaactcgtcatttacattaggtatttctcctgatgctttccctcccccaaccccccacccccccaacaggccctggtgtgtgatgttccccgccctgtgtccaagtgttctcattgttcaatttccacctatgagtgagaacatgcagagtttggttttctgtccttgtgatagtctgctgagaatgatggtttccagcttcatccatgtccctacaaaggacgtgaactcatccttttttatggctgcatagtatttcatggtgtatatgtgccacattttcttaatccagtctatcattgatggacatttgggttggtgtcaagtctttgctattgaaaagattttaaaaagcccacataaaaaaatgaatataggaagccaggcatggtggctcaagcctgtaatcccagcactttgggaggccgaggtgggcagatcacctgaggtcaggagttcaagaccaacgtagtcaacatggcgaaaccctgtctctactaaaaatacaaaaattagctgggcatggtggcgtgcacatataatctcacctactcgcgaggccgaagcactggaatcacttgaacctgggaagcgtacattgcagtgagccaaaatagtgccactgcactccagcctgggcgacagagtgagacttggtgtcaaaaaaagaaaaaaataatgataatataggaatattgatttttcagtttgcctaagagttctaaccttgtctctttacttgactcagagattggaagatttggaaatctcagtttgagaaaatttcctttacatccctctctagcaatgggatattagtaagagatctaaccaatcaagatgctcaccaagtagaagagttttagagcactgagacctgaaacacatcttcaataagccgcatctagtttcatggaagataaaaatatctcaagagagagttcaaatgcttatgtttacattttctatttttctcaatagcataatttcttccttcctaatctactgaaacttctaaaaacatcagcaaaaaacctgtttcacattaattactattatcactcagtggaaatttataaatcagccactaaatgtagaggatgcaaaattagaccttatataactaaacccaaataagattcctgtgaaaattaaaaccgtatcttcaaaatgtatactatatgtaattattatgtcaattaaaaataaagttgaaaagaaaacaaatttaagaaaaaacaaaaaactcttcatctgccttctttgttctcttctcaaaatgtaaaatactgagaaaactaacattttgaaatcatttttgaaatcaaacttattttttgatttccaatccacctttctgttcaaagtaaatatcagagataataatggagaaaatttgttcagaaaaataaaagcaagaatatttcctaaagagaaatgttagaaacataggcaaagacttacatggctatctaaggaaccacaatcctttattgatgttgaatttcttacactttcaagatcacaaatagcttttctgatattcacttatctgaattctgctggcaaggaagcattatgccttcttttgtaacaactctgctcactcttcaagacaaaatgccatttactacactgaaatgctggtgtatacgaaacacaaagcaaaatcatgtgcttctaataaaactccacgcattttatctttgtaaggtaggcccttgctgagatttgtgctcgtgtcaacgctacattccattttctaaaaatcagtataacacaaaataatacagaatctaagccagagctccctggattatacaaaatgattatgcaattcattgttcaaaaaataatgctcaaccacaaaaaattagttctgaatagatatttcaaattggagtgaaattctttgtggacaaccaaggttagaaagctgattttacatattttaataaatttagaatgaacacagttgtgaaactggcaaccagaatggggagaaaatctccactttcaaatgtacgataattataatgccttcttatgaagcaaagttaacagattagcaaataattcgctgtaaataaagtggtaaataaagaataaagctggttttagaataaagcaaagctggttattattatttcatttttaatcattgaatttcaagtattctcagcctactggaatgtatgtgaaataaaactatattccatgtgatgtataaattttaaatttacaaattttgggaaagcagtcacaatcaaactagtcatttagagagagctaggaactatattttctgaacttttttttaaaaggcaacattttatagcattattttctccatactctacaagaatatctacttaaacttcacataatacaactatttctcctttctgacagaaattccctatcttgaactctttttctccaattttaagtagagtaaaaagggcaaatgtaagacaaatataatttatttttgtaataagttacttccttaatgtaacagtggaataaaatgaaaacgacataaatattaaaatccactaagtatacaaaacttcaatatttcaaataaacgttataatttataaatataattataatatattagattataatatattatataaaaactttataatttataaatataatttatgtattatatttataaattatatattatatactatatattacaatatataattatataatacaatatacaatttatatacattttatataaatgtttacataatacatatatctgtctgagctcaatgtagttcataacaactttatttttttagcctaagttattgctgtaattctaagtattactacgtggtgacatttcatgagcctaagttattaaaatcaaacttgtattctgttgaaaaataagcagacaatatttgcatttgattctactgatgaaaaaattttaaaagccaacacaatagaaaactggttattttttaagaacgtgattttcccaattctggaaccatgtacttttaatagaaaagaacatttttcaagtgcttgtacgtagtggcaagcagtcgtcaaaaaacatgtttagaaaattactctaataaggcaataaattatcaaatatttatgacctagtaatcatattttactaaatagaagcatgtaaaattaggcaagcaagcttgaactgaagtcttatgacaaatctcacttaagctccaaatatggattgaaatacaaacaaagatgatgcaaacagctgtgcatgctaatgaaagcactgcttcagtacaagaggatggtgctaatttgtcacggaagtaactagaagatatccgcagttggctagcctttttactgaattgcgttaattctctcaggctagccaatacatctgtcattctaattatacctgacccaattctcatctctccatgatgaaagattgtttataaaatgccacctgaaggagatttacttgtaaagtatttagactaatcaggactcccgtgacggtgttagggaacactcacaaaagggtaccactgtggtttttcctcaacctttgtttcctgtttgttatgggaataaacttgctcttcactgagctgcgtggttagcgtgcaacaggctattaacaagaagctcaaaactcgggatatcatgtcctgtattggaaaataaggggaagtgctttgtcttactgaatgagagacaggagtatgctgggaaactggcactgtctagaaaaacaaacaaatagaacactcttgagttacagtgtatgccaactgccatggtataaatactcccaccattggtatttcaagctactaatggctatggcttacaaaattcctctatactgtaataattagcttttacaggctagcaggagttggctacactaccatgttaatgacaggaaataggggcacaagtgaacacatgtagggagactgtaagagtttttcggtttccttggtcttgaggtgtgaatttaaggaaagaaaagctcagtaggtagatgtctcaggattgcctcatacttgttggtatctgtaatataccaagaacaataacaccaaaggtaagaatggttttccttttcagtttcttacttcctgtctcaatgctgcaaatctgcaccatatggaaggcaggagacgctactagagtctactactcaaaataggatcatggaccagcagagtcaacaccacctgggactcaggccccccatacagactcaacaacgattgttttccaagggccttggataactcgaatggatatctcagtttgagaagcagcatgatcaaccttatcttttaaatgcaatagatatgtcaaaacgtgagacataagatttaatcattttccaaaagaagtagttagggaagaattagtaaaagttgcataggttttggcttattaaaagaagtacacatatatttgggaaaagacagatacaacaaaattagtagtcttaagattcaaatatacagctcaacaacttaatttgaacagattgaacagattgtctatacacatttattttactctgaagttctgtcctatctcaagcaacattaaaacagcttcgatacctctgccttagatccagtaccaagatcataattttcttactcatattaagactattgaaataccagacttcttagaaagctgaattcaagtggtatcattcctataatatcccagaacatcagaaatatcaaagtttttatttttacttgtaaaaataatgaagaaagccaagatcaattcaagggcttagaatatacttcctttttcttttcttttctttttttttttttgagacgaatctcgctctgtcacccaggctagagtacaatggagtgaactcggcttactgcaacctccgtctcccgggttcaagcgattctcctgcttcagcctcccgagtagctgggaccacaggtgtgtgccaccacgcccggctaatttttgtatttttagtagcgaggggtttcaccatgttggccaggctggtctcaaactcctgacctcaggtgatgcacccacctcggcctcccaaagtgctgggattacagcatgagccatcgtgcctggccagaatgtacttccttataccacttctctgtaaagaaagaattagatgatatttctgttccggtttaaaaaaaaaaaaagaaaaaaagaatgcctctagatgtaggtcatgggttggaaggatggtcctactgtttcatgtccttttctggggaagactgacatgtacacctctccatgttaactggcttcttgtcacaatctctagcaggcaaacaacctacagattccagctgggaacagcagtgtctctggttacagcacagatgctaatcaccatttgctattttataacagtggacaaggggagagtgaattccttttgaacaaaaaaaaaaaaaaacaaaacaaaactaggaaagcagtttacctccatatctcactgtctacatggcaaatatgcatacgcaatgtttcaagtcaacattttatgttgttttctgtttctaaataaagctactagactacattacacattttatcaaatacttgcttttaccttactaaatgtgtatttatcatatttgctttggcatatttttgtttattttactttttcttatacaataaaaaatgttcactggttatctacaatgtgcaaagcagtgatacagaagttagagcttacattaaaatgagaccagccgggcttggtggctcatgcctgtaaacccagcactttgggaggccgagatggatggatcacttgaggtcagcagttcaagatcagcctggctaacatggtgaaaccctgtctctactaaaactacaaaaaaaaaaaatatattagccgggcgcagtggcaggtgcctgtaatcccagctacttgggaggctgaggcaagagaatcgcttgaacctgggcagcagaggttgcagtgagccaagactgtgccactgccttccagcctgggtgacagagtgagacttcgtctcaaaaaaaaaaaaaaaaaaaaaagcaaaaaacaacaaaacaaaaaaaacacacaaaacttagctggtcttggtgaggcacacctgtaatcccaggtactcggagacagaggcaggtgaatcgcttgaaccatggaggcagagattgcagtgaactgagatcgtgtcactgcactccagcctgggcgacagcaagactccgtctttgggggatgagacacagtattgcacgggtatttctctgttcacttttttatttttatttatttatttttgagacggcatctcagtctgtctgccgagactggagtgcaatggcacgatctcagctcactgcaacctcaacctcccaggttcaagtgatttctttgcctcagcctcccaagtagctgggattataggcacccatcatcatgcccggctaatttttatatttttagtagagacggggtttcaccatgttggccaggttggcctcaaactcctgatctcaagtaatccgcccacctcagcctcccaaagtgctggggttacaagtgtgagccaccacgcctgggcttctgttcacatatctaaagctgctcatcactgcagatctcaacaccatagcccagtgttttgcaaccagagagagtctatcccctactcctcccaggggacatttttgattgtcatcacttgggggtgctgctggcatcgagtagaggctagtgatgcagctaaacatcctacaatgcacaggacaatcatccgcaacaattatctggcccaaaacatcaatagtactaaggtccagaaaccctgccatagcccaagcaaacaccagaaggattcgtgatgcattttagtaactttgcccaccaagactactgggcagcagtcaccagcacttcagaaatcctgggtaacaaatgctagtaaatttccagaacagatgcaatcataagaattggcaagcaagacttttctttgctcctatcatgaaacataagaacctaaagtcacgtgcaagcaacataaaattgccatccatattctgtgatacttgcatattctgtctagaaattatacccaataagaacatatataaatttaagaaagaggcaaccctactctcatagttaaaacacctgaacagtcttaccattattatcaactaaatatagcgtaacctttaacatttcctctgccttaatcttttttttttttggacagggtctcactgtcaccaaggctggagtgtggtggtgtgatcacggctcactgcaggcttgacctcacctgggctccagcgaccctcccacctcagcctcctgagtagctgggactataagcctgtgacactacagccaaaacaacaatttttttttttggtctccctatggggcccaggctgcttgcaaactcctggggtcaggcgatcatcctgcctcagcttcccaaagtgctgggataacaggtgtgagataccatgcctggcctgtaaacacttttttttttttaacactgtaaaagtctcaatgtttacaatttgggctgctgtcttgaaaattaagggattctcttgagcatcatttttatatgagattcattcattcttgcctccccttgactttttactcttctactaacagaatcacaaaaagtcaggcatattggaagaggtggttggaaaccaaagatgaattttcaggagggcaaaatggttaaaggctgagagaagcagctggttaggctgtaagccactctgcttttggaaactcattgttctgcaagggaactaaagatctccattcaaatccacagctttgtaacctgctcaaggaatctgactgtacttaatcagacctatggcttggctaaaaacgtgtgcccggttgggtgtggtggctcaaaccagtaacccagcactttgggaggccaaggtgggtgaatcacctgaggtcagaagttcgagaccagtctggccaacgtggtgaaacccatctctaccaaaaatacaaaaattagccaggtgtggttgcacacacctgtagtcccagctacttgggaagctgaggcaggagaattgagaattgcttgaacctgggagacggaggttgcagtgagccaagatcgtgccactgaatcccagcctgggtgactgagactccatgtcaacaaaacaaaacaaaacaaaacaaaacaaaacaaaacaaacaaacaaaaaggtgcacccagctggtgcagtggctcacacctgtaatgctagcactttaggaggccaaggcaggtggatcacctgaggtcaggagttcaagaccagcctggccaacatggtgaaaacctgtctctactaaaaatacaacagttagccaggcgcggttgtgtgcgcctgtaatcccagctactcaggaggctgagagaggagactcacttgaacccgggaggcagaggttgcagtgagccgagatcgcgccattgcactccagcctgggcgacaaacaaaaactccatcttaaaaacaaaacaaaacaaaaaaagtgtgcccatgtaaatgtatgcatgtttaaatgaacctgaacctctgagttgctggatttcttctttgaggtttgatttttttttttcttaattgcaaattcttgagttgagtacagttattgtgcctgaggcatctgcacacttttttttttttaaagcaactgatttggggaaaatatgagaaagactaatattctttaaaaatctagtttctggcctttaattaaattggactaaaattttatttttaataaatctagatataattgtattaaaatgcctttcactgattacttctgctattctatttttttttaattggtaaagccaggttctcactatgttgcccaggctggtgtcaaatgtgtatctttgtgaatatactaaaccactgaattctctctcacacacacttctatatggctctattccctagtctcatcacattttaagcaacctaattatctgagtgggctttctagattgagaccattaaactacacggaaagatgcttgtccatgtcctgcttcactctgcctctatcaaagtgtgtatcaaacacctcggaatcaatggctgccatgacatggggcacaaaataacaggctgttacctgtcacatctatggtcagtgctgacactagttctcttgacatcattagcaagcatgctacaacccgggcgagagtagaagtgcatcctctccatcttcaaaacacaaaggtaaaggcctgaggcttgctctataaggaggagccattacccttttgccctgttcccaaatactccctggagctttagtttcatttttgtacagcatgctactactgaggcctccaactgaagtatgtgagttcatgttcgggttcacagcaagttaagttcacagtttaccccaagctttgtggagagttaaatattaatcataagtaaaaatcccgttagtgaattataggataccttgtaagtgtcatgtccattacaaacaagtaacaacagaggcatgagaattaagctaagctttgtttcttctccccttgagatcaatacaagctactctgatttacttcaagtatgtattgcattcattctatttggtgctctatcacccagtaaatccctattcttcctttataattactgatacgccaacttctctgcaacatagtaggtgaaaacttttgttccgggctgagcactttctcttctccatgctgccaaaattccttcctaggcaggcctgagagactcatccctctcaaggacaatgcagatatggctagaagcaacctgagcaagccactttgttcctatctctgtgcccccagcaaccaatgccatgtctggtacctacaagtgccttgtggatattggtgaaatgtatagcaataaatcaaatggtacttctcccagattaattgtcaccagaagaagaaaaataatttaattctgccaaggtcaatcacttagcccaatataagcaatattcggatcaaaccttttagcttttatcatcacatgagacggtgaaagagccatctgtatcagtgtctctatctgttcacttaacagaagaactcccacaaggcttaaaatacctgcaagaaataaaactctatcttgaaatgcagtggcatctaatactatcttatccaattttcagctggatttaaaatttaagtgcagatatttcaatatacagtgtatattcacacaaaaaaaatttaagcaagaaatgtttcttttaatcataacataatgttctctctaaatatcagctttattataccaatagatatggataggttacatttatgccttttataattaaaagtcaacttattggtttacctttaacattcctcattagtagtaaacattagtttgctaatgtttcaaatgcaatggaggatcggaatgatgatataaccataactaagagagcaactaaggttaattgagcagttactgtataccaggaattatgcaaagtgtttcctataaattaattaatttaatcctcacaaaatagttaaatattggataggtcttattaatccctattttacaaaaagaagcaatgaggattcaaggttatttgatttatacaaatttacacagttagtagcttgtaaggcaaagatttgaatctggacagcttgagtttgtaaattgaacacttactgggcatgatggtaagcgtttaacataagttacctaaagtcattcttacaagaaacatgcaagataacattaccatctacactacacacataaaaaacaggttacttaactggcccaaggtcataaaaattctctcaaacactatactagtctatctctaaccaaaaaaaaacaaaccctacctcaaaagaaatcaacttgatatggcagtatgtgaaatagaaagaacttcacagtcaccgtcttatagtgagaatcaggggttagcaaatggtttactgaaaaggccagatagtaaatgttttcagttttgcaggcaaaacaatctcttttgcgatcctcaactctacttccaaaacatgaaaacatccatagacaatttttaaacaaatgggatgggctgtgcctaataaaacttttgtgtagaaaacaggaaaacaggctatttttggccccaatttgctgacccttgatcattactcttatttgtggacccccgatcatttttctattttttttttttgagacggagtctcgctcttgtcgccaggctggagtgcagtggcgcaatctcagctcactgcaacctccgcatcccaggtccaagcaattcccctgccttggccacctgagtagctgggattatgggcacgcgccaccatgcctagctaatttttttgtatttttagtgaagacggggtttcaccatgttggccaggctggtctctaactcctgacctcaggtgatctgctcacctcagcctcccaaagtgctgggattacaggcgtgagccacagcgccagcctgatcacttcaagtaaaaattctaaaaattcagaaatgcacagtgtaaaataatagatgaatatatgcctatatcaaaggtatatgcatttacaagggaacacaggttgaaatgaatttgtgtgtatttataaagaaaataaaaagtgtaattttgacatgagtgtagcagaaatatcctggcctatctaggtccaaattctgatttcatcacttaaccagttatgtgacccaggacaatttattttattctttttttgagacgaagtttcgctctgttgcccaggctggagtgcagtggcacaatctcagctcactgcaacctccgcctcctaggttcaagcgattctcctgcctcagcctcctgtgtagctaggattacaggcgcatgccaccacacctggctaatttttgtatctttagtacagatggggtttcaccgtgttagccaggatggccttaatctcctgacctcgttatccgcctgcctcggcctcccaaggtgctgggattataggcatgagccattgcgcccagcccaggccaattaaaaaaatttttttcggccacgcatggtggcctgtattcccagcactttgtggggggcggggggcggggggcggggggtgccgccaaggtgggcagatcatgaggtcaggaaatcgagaccatcctggctaacatggtgaaaccctgactctactaaaaatacaaaaaaattagccgggcatcgtggcaggcacctgtagtcccagctactcgggaggctgaagcgggagaatggtgtgaacccgggaggccgagcttgcagtgagccaagatcgcaccactacactccagcctgggtgacagagcgagactgtatctcaaaaaaaaaaaaaaaaaaaattcttggccttagagatcttggctttaaacggggaagtaaaatttccaccacacagcatagttacaaggtttaaagacagagaatcactgctttaaagcacaagaggcctgttttcccggctacttgggaggctgaggtttgaactcaggagtttgaatccagcctaggaaacatagcaaaatcccgtgtcaaaaaaaaaaaaaaaaaaatttaaattacattaaagggcaagagtggtgaccgtgaaaatctatatctgcaacaaaggcttcaaaaatctgccagtctcccaggaggtaaaatgctgtctgctctgccccaacgatgccttccacagtagcaaagagcctagccatcagcaggggtacaacgaatagttgctgaataaatggaacataaggaagaaatgtccagttcctctggacagggcacaattggctagattaaataaaagattatgccatttattacaatacccatttcaatcagaatttagaatttatggctcaatcaaaactaccctgatatctctggtttctgaagtacaatcccttcttgaagaacagaaaattaggagcaagtatctaaatacaccactgttgtactcaaatcggtaatggcttattccactagaccaataaccaataatatccaagtatttttttaacaaccaaagatgacaataagcccccaaaaccagatagatcttgcaatcgtgtgctcacttttatttttatttttttgagacagggtcccactctgttgcccaggctggagtgcagcgaatgtgcttacttttaaacaataattttattctactggaatcagtgacagagaacagacatcttctcatttgggtatcatcgattctaacacaatatggcagagaagattatgactacgctaaaagtgtcttatttttcttccctccatttctttccggttttaacgggttatgaaattattgagttttttatgaagcacattaaggactggtatcagtagcaatatgttggtaatgatgacaattttcttagaaaggatggctgtaaatcacattttgttccaggtactgaaacactaacactgaaaacaagattgtaagcctccctgcagtatctcatctttgcaagtcacttctaatttttatgttgaacacagaagcaacctacttgtaattagagttttacaaaatgagtaatcacctatggcgttgccattgctctcaattagggaagaaccacaagtcaccttttgtaacagtgaggaggaggaaaaggactctttgcagctgacccctttaacgttaccctctaaaacatctacttctttactggaattagctacaagcacaaaaaaattatctcgcatgggcacaactgaccataacatgtttctgttaggccccctttcccaggaagacttgcctcaattagagcttttgttcaggagtttgaggtggaatgaatggacctgcattaaagattcctctatttctggggcattaacagttgctatctctcaatgaccaggtatcttgctttcagaaggttgcttttgttgctcttcttgccaacaaaattattaacttgttattttttaaggttcatttcttttttgcctttagcctggagtgttttgtttatgaaattcttttaactgccttcgtctttctacaggaaataaaacaatacaacatctctgtgttccgtcttaatatcaaataatactacctgcaaaactcaagcaaaaagaactggactaatgcagacgataatgagaccaatttatctcaagcaaattgtcttgttctagaatatgggcctaagtttatgtggcatcctctcattgtactgcataactgatgtcactccttgttcacctgttacctcaacagtactagcatcaaaacaaaatctctttattgtctcctggaaaaatctgcagcgcacagtagcttctgaattaatatttgttaattaatcacctgcagttaatgcccatctttgccagcctggcattgaaggtctctatattttggtcccaacctaaaagacatctgctctagcttaaattggaccaatcctgtctcctaaatatgcctttccatggcaccacatttgttttgctagtcctgatgactctacagcaaaatccactggtagacacaccacccacccacacttttggctctagttcaaatgtcatgctctccatggaaccttctctgatcaatccagaagttccctcttactctcggaggcaggttctgtgttcacatttcttacaacacagatggctttgtacttctttgacttctatttcctaagagattttaacatccactagggttagctggtctgtgtgtgctcatcatccattccacatggcctagcaaaatggcttgtaccaagcaggtgctcaaaatctaatgtttcaagtaaaatgggacactaaactggttctattaaacagcccagcttgatggagattcaccaaggactttcagtcccactgcaggctgctagctgctgtaatttgtattcacacttcatttaggtttcgagaagagaagccctgaaaagctgtccttccctgctacaggcatcaggctaacaagttcatttgaccagatctgccatagttggtcctaacagttgtatgaaaaacaccctgagaaagcatgtctcagtatttgaaaaatggtggtttaaacaaaatgcgcatttactagcacatttacttatgtgctaaagtgagtaagaaactgtcattaagtagggaatgataaacttaatccatcttgcactctgttcttttttttcaaagaacatgtaaaactttcaataaattttaagctaacgctgagtgtttaattcagaataatctcaattttaaaagctcaagttaaagaaatgtagaacctcaaaaatactgtgttaagtgaaagaagtcggacacaaaagaccatgtattatatgatcccacttataataacagtccaaaaaagggcaaatctatagagacagaaagtagattagttgttgcttggggctagaggtgagtagagggcttaactgggagtgagtatgtgtgatcttactggagtgacgaaaatgttctaagattagattatggtgatagttgcacagcttggcaaatttcttaaagccgctgaattatatacttaaaagcaaatgaaacttatatgtaaattacaccttaataaggtaaaaaatgcaacaaagggaagaaaatactatagtgacaactatgaatatagttgagggagacaaaatagcccatgttaagctctaatagaacaataaatctgaaatcattaaactttagcaaaaagtgagagaaagccactttttgtaaatgctgtaacatttgtggttgacctttataagtatttgcagtacattaaaattcagtcaagtacatattcattcaatctagctctagaagcatcttttactatctgccaagcagatggcagatatgaaatgcagaactctttaaggaacaaatgcatactctttaaggaactcaatccaacagtttactcgtttctgtaacatttggtcatttaatatcaactgaatgtttgtttttatttcatggagacaagtatgacctttagttcttttagttcacaatatttgcaacacaaacattaattcaatagagaaagtctaagacattaatactatatttacttcttgaagaaagcactgccgtacttcccaataaaacaatgtaaactcaacataaatcacctctgttaaaattcatagcataaaataatgcgatactcaccaaatctttttttttttttttttttttgagacaatcttgctctgtcacccaggctggagtgcaatggtgtgatctcagctcactgcaacctccgcctcctgggttcaagcaattctcctgtctcagcctcccaaatagctgggattacaggtgcgtgccaccacgcctggctcatttttgtatttttagtagagatgggttttcaccatgttggccagactggtcttgaactcctggcctcaggtgatccgcctgcctcggcctcccaaagtgctgggattacaggtgtgaggcactgtgcctggcccaaatctccttctttaatgaaatctaatcacaactactcactcaactaagatttatcgaaactacaagccaggcactctgtgcaatactgaataaaatcaagtccttaccctcaaggagctcatcgtctaggtggtaacagacaatattatataacaaacactcactgccaaaggaataccaaggagtcacctaactcagtgtttgtcaaattagatgactacctggttgggcggagtcttgtagaattaacttgggatttgccaagcagcatatacaaggtacaaaacaaactgtataataaagatttcacattatttgaaattgtttgcttgttaaaccaaaaaaatttcacaagcataagaagccttttggaaaaaaaaacatgtttttgattggggaaggcagtggtgctagggtggatatttccaactctggtattacgctttcttttccttgggggtggggggaatccaagcaaatggtggattacctcgaaccacctcttccacagactctgtggtggtggtggtggtggtggcaatgctggtggttctctctgtggcttcttcgtagggttcctcagcctcttcctctacctcatcaccatcctcatcgtcctcgtcatcatcggcttcttcttcttccacctcagccacttcttcctcctctgctacttctactactttgtcttcactgtgaaggcaaacacaaataacagaaaaagtcaattaaacacatttcagggaaggaaaagaaaagtcgtccatatggaattttggcaatttgagaagaaacacacccaaaacttcaattcagcaggtctaagtataaatcccagctcagtgggtctgcaaaaatttttatccttggggacagttcttagtttctgcagttgctaaaaggggatgccatgagtctaaccacaggacattctggaaaagggaaaattacggagacaataaaaagatcagcggttgccagtggttcagggggagtggggaagggatgaataggtggagtagagaggatttttagaaactactctgcacgatactgtcataagtaataatagatacacagcattaagcatttgtcaaaaccaagagactatactacacaaaaagtcgcctctcatgttaaaacaggaatactggttaataatagtgtatcgatattggttcaaacgtaccatactaaggcaaaatgttaatccaggggaaactgttggggagtggggaagtgagaggtagagggaactttttgtagtttctgcttgaattctttgtaaacctaaaactgctctgaaaaatgtagtccattataaaaagtggggtggtggatatcaaaactgagtttgccgtattatgggaattacttctcatagtgcacatacaagagccgcaacgcattgcacggtagcggatactcagtatatgctggtggaaattggtttaaaaactgcaactgagagcttaaactggacacacaggtggaagatgaagctgacttaagtaaacctgcaatgccctgtggtcagggatgcctgctggaactcacacaggtggaagatgaaactgacttaagtaaacctgcaatgccctgtggtcagggatgcctgctggaactcacacaggtggaagatgaaactgacttaagtaaacctgcaatgccctgtggtcagggatgcctgctggaactcacacaggtggaagatgaaactgacttaagtaaatctgcaatgccctgtggtcagggatgcctgctggaactatttagttgcgtaccctatggttactaactgcttatgttttgtagaaaaccaaatatttcagtggttctcaaatttcagtgagcatcagaatcacctggaaggcttattgaaacacagatcacctacctgctaaatgtggtggctcatgcctgtaatcccagcactgtggaaggctgaggtgggaaaaaacctagaggccaggagtttgagaccagcctgggccacacggtgagaccctgtctccaaaaaaattaaaaaaaaaaaaaaaaaaaagccaggcatggtggtgtgcacctgtagttccagctactcagaaggctggggcgggaggattgcttgagcccaggagttcgaggctgctgtgagctatgactgcatcactgcattccagctagggagacaaagacactgcctccttaaaaacaaacaaaaaccagccaggcatggtggtgtgcacctgtagttccagctactcagaaggctggggcgggaggattgcttgagcccaggagttcgaggctgctgtgagctatgactgcatcactgcattccagccagggagacaaagacactgtctccttaaaaacaaacaaaaaccaacacagatcaccaggtgcctgtggcagtttctaatgcagctccagagtttctgaatcatgaggccttggtggggcctgagaatgtgcatttcaaattcccaggtaatactgatgctggtggtcaggggaaaatattctgagatccactgcaatatgctgagaataatggcaagagataaccagtaactcagtgaaattgggaagaggatcagaaatatttatggtattaaacatttacatgctgatgcatcatagtttgtaaaaaataagcaaatttggatggcaaaagaagggcatgtctagaacaaaattaaaaaggcctattaggaaatccttgtggaaatcatgtacctgtcaaggcaggcatggttgacagcatttgaatatctaatagtaaaagcctatcgtataccacctagcaggactagaggaatagatgtccttgatcagatcacaaaaccaatacaggagaaagacctagatgtggcagggggtttcaacctttctggggcaactaccacaggtctattcgagaagtaccatagtaatagaattaaaagctgctatgctgacattataatgtacccagaaggaaaaaaaaaagcgagagggagaaagcagaagggaattattaccacagagctgattctggccaacaaggagaagctcatcattgggaaaagtgataggaacccgggatttgtagccacaggaagccttggactcgtagtgagagcacagcattatgtaggaaatcagattccaaacacgtgagacaagcgaacactatgattccatgatctacgacaatagaaaggaagactcctccataaacctgaaaggctttcaaagtctaacaggaccgccataagtagttttgctgagagtgaaagggaaagatatgtaaagagattaatccatcaatggcaggaattctctgattacctcaggatttaaagcatgtgttacacaagttgtataaagatgtgtatgatccccatggaacacctgactctgattacgtaggatacaagaatagtataaagggcgtttataaaagtttcaaaaaaatgtgtatgacccccaagtggaacgcctttctaactctgattaaatatgatgtaaggatattaagtgaagacatccgaagaagtttagcatgtggctaaagaataaaaagaaactgattaagcagaataatttattaatagcaacttactcatatgttaataaatgaagtgttaatacagagaaaatcctaatcagttattgtaacatttccacaagactaggacgaaataggtgaaaagagaaacagaaaacactggcactgaaaatcagatgttggaagcctttatctcctcgtagaaataaatgaggtgaaataactgacttttttttttgactgcccaaattattgcacgaaagtttactacgtggggctacatttcaaaagaatccttaacagttgctcagctgccctgagcttctgcctttgcatttttctgtaggatctcactgttgtattactggtgaatcaaagaaagatgacctgatgcatgtcatcagttaatttaccgtgtttgagatctcttacttattcaatcaaatcatgggcactaactagcgctgttttccaatttaagtggaaaattcagggaaagtcaggaagaaaaatcaaaccagtattctctttaaatcatgatgtatacacgtgatcttgaaccatgactggaatgacgatgtccaagtgtaccatccagggtttggacagcaccgtgtttccaggtgggatggtgaaaacatgaccctgggtatccccaggttccttctccaggcttctttgttattacttggatgtggcccttaaagctctgaatagaaaccatgtttgtaaaaacagctgtttagtgtgatctgcattctggtatgtgtctagccgtgaaaaagagtgaattatatgcccatcatccatccctgcatctgcctgagcaatttactggcataataaccaggaacggagacacgtaataaatagttcaaccggctaaggaattaaattacttggcctaagagaactcaggtccaagttcttattaccatagctttgatttctggaattaaatttagatgtccatgaattcaattattcatttggacactatttaaaacaagagcacacggttttgtttgaataatgctgcatcttcccaaagaatgccaaacacaacaacattacaacttttaactgcagttttcatgaacagctagaaacactgaaaggaaaaaaatgacttttccaccacttcttcaaatgctggacagactgttgtcctgtggacttgttttgaaaagctcatcacagtttaaggagttgcaagggaggaacagtttatggaaatataaagctgagcatcataaaacaatttccttacaaacaatcaaataacaactcacaataaaataaacgcttggcaacatagtggaacattcataccacattcgcagactttagtggctatcaatttatagtgggtggcttttacagcttttaaacaccaataacaaacatttttacagaacaagggaaccatctgaaaatgctgaccatccccagagtatctgaatttaataaggtcaaagggacattcctacgaggaaataaatcactgatgataaaattttatgtgtcagcatgcgagattttacttggatgaaggagaaatgacatcacaaaggtgactctccttctgtttctaactaaagctgaccttgatataattccacatgcaggtgccgcctgataagtccctttacagagtgaaagattttgattcacacaccaattttcatttctgtttattaaagtcatgccaaaaaagtcaccatttgtattttctaagaaagccatatgacattctagaaatggcaaaattatagacagtaacagatcagtggcttggaaaggttaaaggcaagagagggtcgaacaggaggaacacagaggatttgggggatagtaaaagtactcagtatgacactacaatggtgggtacatgtcattagacagttttccaaactcacagaataaacaatgctgagagaatgctaatgtaaactatggactttgggtgataataatggtgtcagtgtaggttcactgattgtaacaaatcgctctaagggggacgctgataatgggagaggctgtgcaagtgtatgaacagggagtatatgggagaatctcagtaccttctgcctaattttgctgtgaacctaaaactgctctaaaacaataaagtctatatttattctttcacagtctctgttaagacggacttttttcttcttgctacagataaacagggaggaaatgacagagagaaagctctgattctcatggttatgtgaatatggactatcatgagatccaacctacttgcactgatgagggaagagggaagacaaccaatgtcagttcctgaaatgcaaccaaccaggggaaagctcagcaggaagaggttcagactcttcctctgtggatatgaaaatgggaaaaaagagtctagaggctcccagagtcagaagagagagaaaatacagtagtttttttcaagaagataaacagacggttctccttctctctgtctcaactctccaaactgccagagtctaaactggaaggtacaatggctggataagtcagtttgtccgaaaggaaagcagtttttgaaattactgctactaaattaggaaaatgtttccggggagggagggcaaagtaagaaatagccagtacttctcccgcataaaggcactgttagaagcgaaacacaaggggacacatcacctaattctatttgaattaaatatgaaaacaagcaaactgcaggcaaatagaactcaggggaaaggccagtaactggcaggggccaggagagaggattctaggggccagcaagtctctgtgttctggtccggatgctggctatctagttgtgtggtcttaaaaaactttgcttacttgcattacctcttatgtgtacttctctctaaataaatcagtaaaaaggttgaaaagggtttcttgttacttgcagctaaaggcataagcccacctggggccctaggtttaaggcctccagctttaggaagataaccacatgactggactaccaaaaattcatgactcaggcctgaggaggtggctcatgcctgtaatcccagcacgttgcggggccgaggcaggcagatcacttggggccaggagttcgagaccagcctggccaacatagtgaaattccgtctctactaaaaatacaaaaaattagctggacgtgggggtgcacgcctgtaatcccagctacttgggaggctgaggcatgagaatcacttgaactcaggaggcagaagctgcattgcactccagcctgggtgacagagtgagactctgtctcaaaaaaaaaaaaaaaaggaataaataaataaagtcatgacacagctgattaagaatgagctataaatcacaatcttgatctgaaattaggctatatcatcattcttacacatttaatgaatacttattctgagtgagacaattcacactaactgctgtatgagtaacagacatactgcagattaaacgcttcagaaattcaacagagaagtgattgttgcgaccagaggcatctgagttggccggaagtgataggtggctgtggggatgaggcaggaatatccacataatgcacaagtggaataagaagtaaataaaatataatgaaattttacacaggcactgagttttaacagtgaggaagggtaaactgcagagacacggggattcaggtattttttttctttagccaatggataaatatttgagttgaaaggcatatgtacaaattgatgataatgagcaaaaaagtggcaatgcattcattcattcatccattgaatcattccattaagtacctctctaagccaacccctagtaattcaatcaacaatattcgctgtgctttaccaagtgccagtactattccaggtagtgaagataaagcactcaatttcttggaatctatctattagttggggaggtgtaatatgagcaagaaaaaaaattatggaaaagtactatagggaaaggagatggggctaattgctaatgaatgactatgatagatgtgtgccagggatgggtagcatttcaaacagggtggtcagggaagggccccacggaagagccatgtgaactaaaaatgctgaagtcgggcacggcaaaaccaagagagtgcatggatggctgaggcaggggtaagagcaagtgcaaaggcccaggtgtgaggaagagattagcacgttcagcaaaaacaacaaagggccagtgagcttagggagtagcagatgagggaggaagtataagatctggtggtggagacagacaggcatagtgttacccagtacggttacatttcttacagcaactggaacgactcaatgagatttaagttgcaatgatgtctctggctgctgggcacagaatggtctccagggaaaacatgaatggatgctgggaagctggacactgggccaggagctaggggtacactggaaagcaaaggtggctcacaaggcaagtagccaaaggccagacactgacctcagcacctgtataaatgcaaaattactgccctgataacaattacatacagccagaagacccaaaagagtgagtgctagtgtgtctagtgaggcagagattccaggtgtctagtgaggcatgactgaaatgtgacccaaagaaggtccgaagtgaatgaagtccaggggccaaagatagctctccactaggcagggtgggtagagcatgtgcaaaggcccggtgacaggagggagggaaacctgagcacctgaaagggaattggctgacaagaacagaaagtgggctccaagaatggcaagtcagcagtggcacagagcaggtcttggcaaactgcaacccgcaacttgttcttgtacatcctgtgagctaagggtgggctttgcattttttaaaggattataaaaagaaaagaaagggggtaaaaatgacagcaatatgtgacagagattgtatgcgacctgtaaggcctaaatacggattgtaaaaatgaccatttaaagtcaaaccaacttctctcaacacatgctcctgtaaaccctgccccacttacgttagtgaattagtgaatttctaaaaaaaaattactgaaacaagcaaagagatccgagaagcactaaagcccagcttttgtgtaaaccagcagttcctgggcagaacctttaaaagacaatctctctttactctgctatctcagtacacacttagggtaacatgaatatcctagcaatagagcaacaatctaaacaatacccctgggacatgatataagacaaatccaaggagtggacagtttataggaaaactggtacagcttcttcagcaagtcagtgtcaggatataaaaagtgctattctgaatcctaagaattaaggatgtaagatgctggccctggtgccggataggatgtgaaatgcataacctgtgaaggacctttctggaactcagggagaatctgaatatggacatggtatccaatggtactaaaaatttatgttaattttgtgggtgagatggtatcatctggactctgtagaaaaatgttcttagattttagagacatatactgacatcttaaatatgcttcctatctgaacttttctttaaaatatcttggcatcataaaaagtatgtttaaagggggaaaatgatattctggcaagacttaaatttggaatataattacagtaaaaggctaaattgcttttttaaaggctatcttggaggcaagaaaagtcatatattatcaaaagcagattattgttctgacagctttatgaaccaactagaattaaggagaagcacctaaggtcataaaaagttttggagtcattttaaattcttgatatgtgaaaaagtttggttaatcagatgctaggccagaaaactgtgaacgagcaaattcctcatgtccaaaggtttagctgctactaaggatgggtgatccatatatattttgggtggagagttggaagtatatgacctttggctgtctaacaaatatttgagttccagggtctgctctggagtctagggatgctgcagagaataaagcagacaaaattccctgccttcctggtatttacattctacagggaaggaaagatataagaaaactaaaacaacgatgttacactagcacattacaaggtgacaagtgttacagagaaaatgaaagcagcaaagctaggggtgggctggggctggtagttggccgggctgttgcagtttctacagaagatggtaaaagaagatgccctgaaaaggtgtcaatgcagcaagaactatgtgcctggcatctccttccactgtgtccatacacatgagaactactacacagctataggtggtctgtgtccaaaatggctacaaagcaacctaggaaagtcacaaagtaagagaaaagcctggtccttttcttttgggggcactttgtgaagacctattccttagaaagaagagagaagctgcatgcttctgggcttctccccctcttttttgggaaaaaataattggttctgttaaggaagtgtatcagtctgttttcatgctgctgataaagacatacccaagattggggagaaaaagaggtttaatgggacttacagttccacatggctggggaggcctcagaatcatggcgggaggtgaaaggcatttcttacatggtggcggcaagagaaaaatgaggaaaaggcaagagaaaaatgaggaagaagcaaaagcagaaacccctgataaacccatgagatcttgtgagacttattcattatcgcaagaatagtacagagaagatcagcccccatgaatcaattacctcccctgggtccctccacaacatgtgggaattctgggagatataattgaagttgatatttgaatggagacacagccagtccatatcaggaagcaaaaacaacaaactctgctcctccttccagcacgctccccaaaatgcagcaataccttgtcctgccccagattcgtaagtggagccccattcctaggagaaaacagatacatctgcaccactgatcctcagtggcagaatatgccaggtatctgtccaggagaagaagccatgtggctcaggctacagggtttatagcccaaggcctcccttgcctctgtgctctgagggcttgaagtaagtagaaaagtactttaaattgtatcataaaggtaaagatgatgtagcttcttgggttagccacaacatttaggaaaagcatgttctggagaggtaagacttttagttgattttccattagtgagctaacatttttcctcttccaacaagcccactttcttgcattggtaagtattaagtatctttttttaaagtatctgtggttggttggcatctgagaaatctgtagggtcaaatatcaaatagacacccctagcacaatgccacaaatgcacaagggatgaggctatgaaatttgtgaattcttttcctttctcaaggaacgactacacttacatatactccagttaattgtatgttctagttatgtagatcctagagagaaggtctagtgtggtgattaatggtgactttccagagctcagccacgtgggtttcattctcagtgctgccacctgccagctccaatgtgactatgaacatgtcacttaggctgctgtgacttggtttcctcatctttaacatgggatggaaatattaaccacctcaggggatggtgtgaacagccaatgatgtaaataacacacttggaacagcacatgataagagttaaatactgtgcctatttactgtttttaactacagcttaaatgtatacttatgacatttcttttctttttattgctattaggttttgaaaatggtataaaaatatcatttgtttttcacaggtaatgtttttcttggggcttattattttagaaaaaaaaaaaatatatatatatatataaagagctatcctttactgggcgctatgcctagtaagttcccaactgctgactataggctcagagccctgcagagatgggatgtaaacaagcataaaacagtgttttcagtgaagtgcatattaacaataatgggctgaacaaagaatgttcattggtggagtttgggagggacagactgaagaataatctgttgaagaggtaacaggtaaactgggacatgatgaatgaatagaaatctacaaagaaggtagcaaacaggacactgtagaaacagggaatggcacccgtagcagatgaagagtgatatggtttggctgtgtcctcactcaaatctcatcttgaattgtaatcctcataatccccatgtgtctagagaaagacctggtgggacggaattggatcatgggagtggtttccccatgctgttctcgtgacagtgagggagttctcaggagatctgacagttttataaggggctgttcccactctgctcctcgctcttctctttcctgccgccttatgaagaaggatgtgtttgcttccccttctgccatgattgtaagtttcctgaggcctcctcagccatgcagaactgtgagtcaattaaacctctttcctttataaactacccagtcttggttatatctttatagcagtgtgaaaatggactcatacaaagagtgctacaggaattgccaattctcagtatggtggaggagggggtggactgcaggaagggagctgactagctgtagctctgctcttttatgaagggctttgtttcacaggctgaggagtctggaccatcatctagatgcagagcctagtagaaaagcctgaagcagaagagtggcaaggttagttgtattgcaacaaacatgagctagcagaagcatggaggacagataggtggaggagcgacagttgggatgtgaaggcggtgctcgtgaagcctactgagaacttggataaaataacagcacagaactggtgactggggatgaagggagtgagtaagaggaggaatctgatgctttgagttggagaatagttactaatggtaacagaggatacaggaggaattaagaaatggagctaatgggttcagctttgatcatggtagacttgagattctgtaagaccccgctggagaggcatacagcagacagctgaaaacaaagaacaaaaaaatctgagccactaatacacaggcactgcttttctatttccattaaataaacagtgctgcactttgttgttttttaaactaaagagctgccattcctgaaagaccacagataatagaccagatgcccactcactttctgcatggataatatgtcccactgtgataccattatttaagtagaaacaaaatctagccttatgaagtctaattataccattcctcctccttccttcccctctctctccctgcaagcataattcaagactgctttcccattcagagatctatgtgagaattttaaaacattgttgctgattagtctctctaatcaataaaagaaatctactatcggccaggcacggtggctcaggcctgtaatcccagcactctgggaggctgaggcgggcggatcttgaggacaggagatcgagaccatcctggctaacacagtgaaaccccatctctactaaaacacaaaaaatagctgggcatggtggcgggcgcctatagtcccagttacttgggaggctgaggcaggagaatggcgtgaacctgggaggcagagcctgcagtgagccaagatcatgccactgcactccagcctgggcgacagagcaagacttctcaaaaaaaaaaagaaaaagaaaaagaaaaaaagaaaagaaaaagaaatctattatcgattagatttgataaatctattattgactagagagaccaatcaggaacaatgtctaaaattgtgtatgaaaagccattcactcatcaaatgctagtggctgctaagtgtctggcattctgctggatccgaggctccaaaagggaaaaagataagctccctgtactcagagagattacattctatggggggagagaacgacaacgaaccaataaaatactaaaatgtgattcatttcagaatggaagtaaataggctgctaggattgagaataatgaagaaggggtgttttcttcagaaaagaatgatcagggccaggcatggtggctcatgcctgtaattctagcactctgggagacggaggtgggaggactgcttgagttcaggagtttgagacaagcctgggcaacaaagtgagatcttgtctccactaaaaattaaaaaaaaattagccaggtgcagcctgtagtcccagctactcaggaggatctccagagccagggaggtcaaggctacagtgagccatgatcatgccactgcactccagcctaggtgacagagcaggaccttgtctccaaaaaacagaatgatcaagggaattcattctggaaagatggcaacaaaactgaggctgaaggtgggaccttggaacatccattatagacaatgagatctgtcagcccgggggttagcaagctggggatattgacttgtgtgacactgagcaggggagagtcgggggaaagagaggcatggggtgatactgcggaggtagggaggagctgggtcaaatacactaatacctgtaaggaatgtaggaggtcaaacctgacaccaactacgtgtttgttagttgttacccgttatcaattatcctcagcatatccaaataaggcttcattgttttctctctgtgcacttggtttttaagcgtattggtaagccacgaacacaacttaaatttgggggttccaggatctgctttatgtaaataaacactctacatcctggctgctgtacagagaatggcttggtgtgggagaagaaagcagcgcatgtgtcagggagagagaacgagagcagagattagcaggatacggaaataactccagcaagaaacaatgggagtttagattagtgctggaaaagatggagataagtggataaatccagaattcataggatgtgcagaagagacgatgatgagttctaggttctcagcaataatccctaggagagggcataggaccattactgagatagaatagctttgagagaaccacattgaggactgggtagcaggggaattaagaactctcatttggacatgttaggattcatatgcctatgaaataactaggtagagtctggcctagagaaataaaccttggcctagtctacttacaaatggtatttaaagtcaagggcatggattacagcaatcaggaagagcgagccagaaagaaaaatagtataataattgtaaagagatagccagtgtcaggaatttaatggatgaaatgtcaaaacaaaacaaaatcagccaagacaggataattaaaaccacaaaggctagggtgggggtggggggtagaactggggggtgggcactcctaaagcctgcataaacaatgtgtaggaaagacaggctggaaatgacagtgacacacaggttactagacaaagggcttctgagaaatggcaaaggtaaccaattctaagaacttactaatcttaaggtgatttatagataaaagtcccatcctataaatgtctggattcttgagcccagagatattctgggtctgtctgtactggtattctgctgggcaggtaaaggggttatgaagagaagtactatcttacttgcctgtcaactaatactgatgacagagcaaaagcgtcatgcactttacagtcgtggtcatagccaaagattgcagatgtcctagacacagtatttgagacagagaatggaacatacatagccaagttactaatatacatgttgggtaagaagattcccaaatggaaggaaggtaaaaaagctctgttctagtacaaccatttgaggatagtatggagattcctcaaaaaactaaaaatagagctaccatacgatccagcaatcccactactgggcatttatctaaaggaagagaaatcagtatattaaaagaggtatctgcactcccatatttactgcagcactactcacaatagccaagatatggaataacctagatgtccaaagagactaatggatgaagaaaatgtgatgtgtgtgtgtgtgtgtatgtgtgtgtgtccgtgcgtgcatgcacgtataatgaaatactattaagccatacaaaagaataaaatcctgtcatttgaagcaacatggatggaactggaggacatatgttaagtgaaataagccaaaaacagaaagttaaacaccacatgctctcatatgcagaagctagaaaatgttgatttcatagacgtaaagagtagaacagaggatgatggaggctgggaagggtaggtagaaactgaggatagagaaagatttgttaaaggataccaaattacagctagataagaggaataagttctagtgctctacagcactgtaggatgactacagttaacagtaatatatgacataatctcaaacagctagaagcaggatattgaattttcccaacacaaagaaatgatacatgcctgagatgaatatgctgatcagtctgatctgatcactgtgtaccctgtaaatgtgtacaattattacatgtcaatttttaaaaataaaaatttttaaaaaggtaccttttaatgaacggtctatgcttaaaatgttgctaggtgtgtttcaacaccaatgagttatatctgaggttggaccataactagacgaggcacttagagatgcggtaactgtggtctcagcatcctgttccactgcacttagttccaccatcattgtattacagtaaatgcaatattgctatcctgtgactaccttgtaaacatattttcataaaaccaaagtgcttcattaccacttctgatatgtgtatgagtccttggctccaattttccaataatagtagctatacaattatgttgaaaaccatttgaggctaaccattaacattcaaatgacgtacaatgggaaacgaatgaatagtatattctaggagataaaagatcaaacctttgatatatcttctcttacttattagtagttagagtttaagatacaatatttcttctaaaaccatttcaaaaatataatttaaatataaaattgaagatcctaaaaaagtatagaagttttaaagtagaatgactttgctatttgaatacctatttaaatttctatttaaaatgtccaaaacagcccaaatcaattctaccttcatttttatagcagttttctaatcatgagacatcatactttctagtcctttttgcttccctaaaataaaaaaactcctacatatttaaattcataaataagaattatcattacttgattactaccaaaactaattttaataatgttctcaaccttatctaggatagaagtgcttaaggagccattacgtattattattgattatgattacaagacctacaataattttaaaataactaattaaaaagggaacatgttataatagccatgattatcaaaccagaggtgggagatgagtcattgagccccaaggagagtctttgtattcgacagtgtgagatgatgggtagagaagtgatttgactaagaaaaaaatcaccccagctggcgcggtgtctcacgcctgtaatcccagcactttgggagcccgaggcaggcggatcacctgaggtcaggagttcgagaccagtctggccaacgtggtgataccctgtctctactaaaaatgtaaaaactagctgggcgtggtggcaggcacccgtaatcccagctacttgggaggctgaggtaggagaattgcttgaactcaggagacggaggttgcagtgagccgagattgtgccactgcactccagtctgggcgacagagtcttaaacaaacaaacaaacaaaaaaaacatcccatgctgctggcctgctcccccaacaattccaatctacgcattttaaacaagtccactgtaaactttaccggcttgatatgcatttacaccaattagtcgttttggaagcaaataccgtgatacagattattgcaattttccccatgtttgaggtaaagaaataggctcaaaaagattatatatgagggtaaagcacattttaaacctttgaagatatttttgaagcaaagattatcttatttacttacaagtcttttctttccttgactacttggatgcgtctattacacctggtttctgtttccacccaatgtctttttaggcaggttagttctatcatcatgaaatcactgtaagtgcaatactgccctttccttcatgatgtcattcatctctttcccagtttgttatctaacacgtattaacattttagtatccaactacattaatctcatgactactagcattgaaagaactgataaaaagataaaagcaaacccttactgcctggtttgacaataagtaacagctcttcacaaaggctggcaattaggtcactaagcaaaaaatcttggaagaccaaattcgaccaacagcaaacagtggtctcaaatgtaaaagaaaacttaggttatatgctacgcttacaatagcaaattatgtatactgcttgaattactattgatctaaataaaatggtgctatgctataaagattattttcaaataatttctaatatcaaactatacttttgaatacccttggcaaatcttttccagaattacacattcctaaaacaatgagccaatccacaggcacgtgtggcctactatatgctcaacattcacttctctttaaaacaatttacatgacaaaacaaagtacaacagtgaacattcatcagttgcaccttcaaatgtctgacaacacaatcagatgatctgtgtgtcctttacttattaaattgataacaaatagaaaataaaatgtagatctgaaggaagcacttaatttttttaatttgctcaattgcaaaaaatttatttatataaatatataaaatgaattgctatattaaaagaataatacaaattaaaatactataaataataacttgactgccttacaaaatcaatttgagctactgtatttacagattgagtaatccttatccaaactgcctgggaccagaagtgtttcagatttcagatttttttcaaattttgggatatttccatacatataagatatgttggagatgggacccaagtataaacataaaattcatttatgtttcaaaaataccttatacacacagcctgaaggcaattttatacaacattttaaataatttttgtttcagaaaggaagtttgtatacattgaacacataaagtcacataattttctacgtttgctgtcatgtcagtgctcaaaacattttggattttagggcatttcagattttggattagggatgctcaacctgtattttatggtaataaaccgcatttctttaaaaatattgtacattcttggctgggcatggtagcttatgcctgtaatcccagcactttgggaggccgaggccagtggatcacttgaggtcaggaattcgagaccagcctgaccaacatggtgaaacctcgtctctactaaaaatacaaaaattagccaggcatggtggttggcacctgtaatcccagcgactcgggaggctaaggcaggagaatcgcttgaacctgggaggcagaggttgcagtgagcccaaatcacaccactgcactccagcctgggcaacagagtgagactccgtctccattaaaaaaaaaaaaaaaaagctgagtgtggaagcaggcacctgtaatcctcgggagactgaggcaggagtaccacttgaacttgggaggggaggttgcagtgagctgagattgcaccattgcactgcagcctgggtgacagagcgagactctatctcaaaacaaacaaacaaacaaacaaacaaacagtacattctagagtttaagctaatgaagactgttctcccagtatctcactccatacaaaaatatatattaaaaattcaggtgatcatggctttggctaagtggcattagtctaccacctacaattttacattgaaacactggggatactgcaaatgttacctagtaaactaaaagtgttactttgtaaacagggagggcaaaaaaggaagctagttagctcccacttgggacagattttgttcactctctacctctactcaaaggaaatagtttgaacatctctaaattattttcgtaataattgccttccttccaaaacaaacatggacttataattttgctgagttccttgtggtaagttactggtactagtttaagccacatggctcccaagtaaagccaacagtttttggcttgatatgctaatatgtagattttgaggccacagtaaaattaattaactaattaaagggttatttttccatgtcacaatggagagtcctatctaaattaggggttttacactgaagatacaaatatccagatggtttcaacaagaaattaatgtttcggtgtactattgccagagaccagttaaaatcataagaatctgtattttcttcctcttttcctactatttttaagccagggaatttgtacagtttaattaaaagatactggagggaagaaaagagtccatgcatcagtagcttaggatccttagcactgaataatccaaccctccaaataactcttacaaatgaatcctacagtatttctcattcagcaatatcctgttactggggcaacctgtgccattaggtctcagtaagcagcacagtctcattgccagatgtagctcagacagcagcaactcaagccctgcactacagaggcatctcctcttccagccatcacctgcttggaaacaaaaacagaccccactggtttggccacacatctgtaatctgcttaaggctataaaagtgttttgcttttctttttgacatacatgtagtccaagtttattcaatacaggaatcgagcatttctaaataaggacctcaaaactggcagccagttccctcaaaagaaaatgcaagtttctgctattctcctattcgtcattttcaaatgagttctcctatttcagtatagacagtcagaaagcctcacacagtcctggaagctgccaacccagcattatgacagctgcttctcaaagccatgagccatttcattaaatccactcttacttgactcatccactggcaaagatttaaagctttaatttatcttttgtatgattcactttgcggccctctaaagttgttaggttttttttccttgagcatttaatatcatttctcaaaatgcaatgcagaaaggcagctgaaagattatatattcaaaaacttgtaactccagagatacaaataaaaagatatatagtcaaatacagcctctctttctctctcacctaattttaaagacaaagtactgaatagacataaattctcatgacagcctgagctcatcaggtaaggctatgaatgtttcaacatcactagctaagtggaagaccggcatgtgcataatttattacatgattgaatgacaagttttcactaactacaaatcatgtatttgtgaaatgcaccatctataataccatctggttattattttctgagaaaagttctcagagcacaatgaccataattaaatttgcttttgactagatgtagcactgtgccacctacaaattgagcctgtgcaagcgttttatgatgactgcattgattattgttatcaagatttcaccccttggtctggcgtggtggctcatgcctgtaatctcaacactttgggaggcccaggcaggaggatcacttgaggccaggagtttgaaaacagtctgggcaacatagtgagacccctgtctctacaaaaaaaataaataaatcaaaataaattaggcaggcatggtggcaatgtgtttgtagtcttagccatttgggaggctgaggcaggaggatcacttgagcccaggagttcaaggttacactgatctatggttgcaatactgcactccagcatgtgtgacagcaagaacctgtctcctaaaaaaaaaaatcactttaatatagtatctggaacatatcaaatgctcaagaggtttagtgcccttcattacactggaggaaaaaggtgacattttgtacctctgcatgctcagatacagtttgtttttgagttggaaatatttcatacttcatcttttcttattcttacaattttcctttatttataatgtagccatccctcttctgcccatggaaataatgaaacatgggacccatcatgctatgttattagactcctgatgcaattttacttaattactgcatgtctagaatgatattccttagtttttcttttcttttcttttcttttttttttgagacagagtcttgctctgttgcccaggctgaagtgcagtggtgcgatctcagctcactgcaacctccacctcctgggttcaagcgattctctggcagtctccccagtagctgggattacaggcacatgccaccatgcctggctattttgtatttttagtagagagggggtttttccatgttggccaggctggtcttgaactcctgacatcaagagatctgccagcctcggcctcccaaagtgctgggattacaggcatgagccaccatgcctggcctagtttttcttttttaaagaccagttagttttggtgacactattaaccttaagttaacatgatgacgtaggtgtatgtgtttgatgtgaatgccaatgtgattcaactcaaatacttgttgagcacctaactacctaacttatagaaaattatgccaagtattttcctgcatcaggttgtacaggcctcataataaatgtaaattcttggtaagtaggataggctgttaacctttagaataccatcaggtcttggacacaattttacctttgagttctgagcacttctaactacttgtgggctgatattctcactttatccattcatagagaaaaagaaatttaatcgactaaaactcattctagcttgtacttaaccatgagtctgagatatggtatgaacctcgatctttttcctatattgtgttcctatgttacaaaatatttatcatccgaagaattatttcatcattagccatcaactatttaaaaactgtgctaaagaagacaaaataatatgagcatgaaagaatgatataattgcctagaaaggtgatgcaatagggaaattatcacatttttattgctgtgttcccaaagtactgcatcatctttcaagatggtttaaaaaaagtctgcatagtcccagctacttgggatgttgaggcatgaggatcacttgagcccaggagtttgcagctgtaatgcaccatactcacaccagtgaatagccactgcgctcaagtctgggcaacagagtgaggtcccatctctttaaaaagcatgataaaaagaagtctggagactcactgaatatagtcaaaaatcatcttccacatattggcaaataggaacaactgacagaaggaggcattttaccaattagataaaccagaagaagaatgaaattgatcacgtaagtaaaaccttaggctatgagccttcacatgatatcctagatgaattttctcaagctcaagaattgacaagtgagcaatgtatttctttctttctttctttcttttttgaggtggagtttcgctcttattgcccaggctggagtgtgatggtgcaatcttggctcactgcaacctctgcctccctggttcaattgattctcctgcctcagcctcccgagtagctgggattacaggcatgcgccaccacgcctagctaattttgtatttttagtagggatgggctttctccatgttggtcaggctggtctcgaactcccaacctcaggcgatcggcccacctcggcctcccaaagtgctgggattacaggcgtgagctactgcgcccggctgagcaatgtatttctaagaataaaaaggaaatatggtattctcatccacttagtcattcaacaggaaggatatcatcactcaatattatgtgacaaaaacattaaccatcattgctaaaatgatgtgacagtattccttgccattttatgatgcttatgcaacacattttatgtctgtgcaacacatttatttgataccattaggaagtggacaaatgcccaaggcaggaatctctctaaggtgattagaagagataatgcagaaaaaaagggggaaaaaaagactggcttgatcattttaatagctgtttacaaatccaaacttgaaaacattttattcctgagggaagatggctatattctctcttcaataaaattatgagctgtcaatgttttaaatatcttaaatttttacaataattaaatgaaattgcaagtataaaaaaaaaagaccaagaaatatgatgaacctaatagagatgtatttgaaatgtagaaccagtatttgtaagacggatatatttcaggttcgtgcatggcaggtgattagcagctagctgcattccaaaggataatgctcatttcagaaatccataccttcaaaactgggaaaatacagaataaacatgtgggtttaccatatttaaattcttcgtaaaattaaaatatttactatgttaactcttattaaaattgctaatagttatttctcactattcctttattcttagttctgtaaattgtttaccaaataatctaaaaatatgaaacaataataatataaacggcccactgtatctagatagtcaatggtgctggcctggttttctggtgtagttagagggcaaggtgacgtcttgccatatgtgacactccagcaatcaccagaactgatgaagtttaaactgggttcaatacggaattgtatattccaatgcacgcacacctgcatacatggccatacgcacccacacaagccaccccgagctgtattagttcatttgcatgttgccgataaaggcatacctgagactgggtaatttacagaagaaagaggtttaactggacttacagttccacatggctggggaagcctcacaatcacggtggaaggcaaggaggagcaagtcatgtcttacatgtatggcagcaggcaaagagagagaacttgtgcaggggaacccctctttttaaaaccatcagatctcgtgagacttattcacttcacaggaacagcatgggaaagacttgcccccatgattcaattgcctcccaccgagtcccttccacaacacatgggaattcaagaagagatctgggtgggaaaaaagccaaaacatatcactgccccccaaaccagagagtaacattaactaacctggccaacatggtgaaaccctgtctctactaaaaatacaaaaattagctgggtgtggtggtgaacacctgtaatcccaattactcgggaagctgagtcaggagaatcgtttgaacccaggaggcagaggttgcagtgagccaagatcacaccactgtactccagcctgggcaacaagagcaaaaacttcatcttaaaaaaaaaagaaaaagaaaaagaaaaaaaaaaactcttccaagttatacagtcttaatgaaaataagacacggtcaaaaggaatcactcctccagatcttaagcagctctttaaaaaaaaaatgttcaaagaaatagaaaaaaaaaatcatctaattatccagaaagatacatcaagttacctctcagcacacgctcaccagtgtctgcaaacctaaacctaaaagaatacatcgataattaaagattgtttcttaaaaaaaatgtgagtacctcctctgcaagaggaaaagtgtgactctacaacaattagagggtcttctaacatttcatttgctttacgaattcagcaacccccatggaccactgggttcaatcagattctgcagttccaggtgaggagcagctctgcctccagggctaggctgcctacctggctagtcttacaagttagctttccaaatgaattttcccatggaaaaaaatcttacccacgatggctggagtctgtgtattattaacattatgtacgtaattattattattaacattatgctacataatgttagtaacagtctggattatgctacattacagactgcataaataggtattttgaggtgatctgagaatatgaccattacaacactggagaaaaatatactcggtaatttacacataaatttctgaaacactacctgttttgcctatgttaaagatttacctctttttcatacctctttttcaatgaggtcataaaacagagctcatcctacaaggaatgtttctctaaatgccccattagcgatagaaaaacactcatcttctatcaaaacaagcctcattaactaccaaacaacaaaatactgtgaatcaaatattgtttccaggaaaatggtagctcgtttctccttcttcaagaattgtcacgtagcatcccctgaagatgttttaagtcaggtacgttaaacttctattctgattttacatttcaagtgtcaaaaggagggctggttcctggaacaaggaggctgccagttggcaggagcccaccttgtgtgtggatcagtgatgcaacacctttctggttttgtccacatgaaagaagccctgcccgcctgcagggctacaggaaaagaagttaaaaaataaaatggtgcaagtgacctgatatactaattatactgaatccaaaccaatttttttaaattttaaaaacaagaatagttaaaaacaataataaaaattcagtggctcagccttagaaaacattactaggttatacaaaccgtctgtcttaatggaaaaataaagagtgataagaaatttcaagtcatccaggaactacactgtccaaatatagtagtcaccagccacatgtaactatcaaacacagtgtgtggctagtatgaattgagacgtgctgttaaatgttaaaagaagtgttaagacttcttacgaaagaaagaaacataaaaaaagaatgtgaactatcttattaaatttttcatattggtcacatgatatttcagatatactggattaaataaaatgttgttaaaattaaattcacctgtttctttttactatttttaaactgtctattagaaaatgaaaaagtaaggccaggcacggtggctcaagcctgtaatcccagcactttgggaggctgaggttggtggatgacgaggtcaggagttcgagatcagcccggccaacatggtgaaaccccacctctactaaaagtacaaaaaaaaaaaaattagctgggcatgctggcacatgtctgtaatcccagctacttaggaggctgaggcaggagaatcgcttgaacccgggaggtggaggttgcagtgagccgagatcacgccactgcactccagcctgggtgacagagcgagactccatcttaaaaaaagaaaacgaaaaagtatgtggctcacattacatttgtattagacagttctttgctaaaagatgggaggctctataacagggcctatagaaaaaaaaaggcaaaaaaatttcataatgttttaagaaagtttatgaatttgtgttggtccgcattcaaagtcgtcctgggcagtgggctggataagctttctacaatatccaatcgtggaccatgaagtccttaccaaaagctatgaaaaaaaatttaaaatatacaatttactttgtctaatatttattgaggacctatgtgcaagacataccagacacataaactatagtttggattctaacagataaaaagagatatgactacaattaattggaagataagttatggtcttataagaaaaaggtaaagcaagggtagtatagcagagcaaggcacctgtaaagacttgtaaaggctgcatcttttcaggtgaacatttataaatatatagattttgacgggtcataagaagtggcactttagagttgacaaatatctttatcatacattaaccccatttgacaaaaaaaggaaaaatatttcagatggggcagaacggtgggaatgaaagcctagagaaagaaaaggtcaatggttttaggatgccaggagagtcacatacatgtataaggctgaaaatgcaggctgaagccatgtaagagacttctgaatgccctgcaagagaatttggacttttctacaggtagaataaaccatcaaatatttcctaccaactgtcaacaggattaaaaacacatagtagaaagatagtaacacatgggaaagaattatctgggaggagggtggatgaagcctgggggtgtgggggagagggagactgaaaatgcaagaaagggagaggagatgattgagagtccagcagaacataatcataaaagggaagacaggaaacaaagggatagaagaaggtacaagagttgctgaagtacaggagaaaattcaatggtttattcaacaaacacgtactgggcacctaccaaatgtcaggtaccatgttgcagaaattcacaatggatgacggtggaggggtcatctgtagagcatgagagagagttacgctgggaaccaaggagaatgaagttgggctggatcaactgctatggggaagatgataggtcatcaagacagagataattaggtgcatctagtaacattaagatcccagctgatgttacagcatgaataagaaatggaattaagtggtaaggttacatgacttgatactttagaaatcccagaagcaactaaagaaagaaattaatttttcctagctatggagaattgacaaaaatatgtttagaaaatgtgaagggtttcagccaagtcaaggatgttcaatggaataggtaagaatggttatccattgattccatcctgattagaaaggcaggcagggaaaaagaggataatggactaaaagcctgaactggggaggtgattatgagggaagatcatgatcagagaggaatatcaaagctataaaccttatggtactatttctaaggaatttcagagtctaaagcatgactgtgttcaggtactgaaatgggatgtaaatgaaggtaactaggaaggagctggctagcatttcaactgaatatcaacctggatagtgacatcatcactgaagactgtaattggtgggggtaaccatatgacccagtttgcctggatccttcagtttatgactgtggtcccagtgttctagctgatatagacaataaactctatgggggccctagtagcagattacaccagaaattaaaagaaaaaaaaacaagcatcctgtagtttgccgattataaacttacaactcctattgaatgtgctgtttggaaatctgtagctctagggaacatctaagagaatactgaaggaataagataagtgatacaatcatcacccttcgggggatgagacagcataaaatcaatgcctgaaccagatggcatttccaacccaaagattctcattttataattttatgatttgaatatagatgtttgccttcagttaagaatgagaatcaggtaagaagtaacgggactaagctccctaagaaaaagaggcgaaaataggtttctttacaatcaacaaatcaaaggtagttaaaaaaaattaacaagcatttattaatgcctttgacttccactatgaaggaaaagaaatgataaaaggccaaaaaaaaacccttacacatccacacagagaacgcccaaaatctcaaaccaaacctttaacgaaaattcaccttaaactaatgactgacaatcccagagagcatttaaaaatatttttaaattaatgaccaaaacagaacgccattattatttcaactccctgttagaactaccagtaacctatgatagttatcagtgggattttgatcccaagtttaatattaaatagttaaaattaactctgtgatgggtgactgatattattaattcaacaggatgccataaaaattcatagttcagatttttgcataacagcagactctgatgggagtgggcagagaccttttcagtgataaacagaaagattaatttacaggatacaaatactccatacaagatgtttcagcatctctgaggctgaacacaaaggccaccttacctcccatctgcatagtctgtgtctgctccgccccaccagacatccgagtcatcctcctccgcatcagcagaatccacattgtcactttcttcagccagtgggcaacacacaaactctacccctcggaacttgtcaattccgcagggcagcaacatgccgtagtcatgcaagttggtactcttctcactgcatgtctacaaagtgtaaggagaaaacagtgagtggtagagtagatgtgtttcattgtaagaaaactccacataaaataatcaacatgcagacccaatatattaggaaccaatttcacaaaggaaaagattatttgctttttgagtgaatttacaacaggattttttttagcatgggttacactttggtactctttttattcttgtttattatttatttaataagaccacgatgttatataatagaggtttatacgaacaactggaatggaaactaattgggaaataagatgtagcagtctccactggtgaacagataccagagaattaatgccttctggcttaattcgtgtatccagaaattgtgcgcattccaggtagatccccagctcactcctacctcccttacagatggaagtttatctcacatggacctgccttatcctagaaattctgactctcttggttcactttcagagtaacaatcctgggaagagaagaaattatcccctgcagccactaagaatcagaacttacagtcattagagatttctccttgaatgtctttttgcttttctgggatttgctaaatttgcacaaatctagattagcataaagttctgagagcatccactagtgataaatgaaggatgaataattcaagacataaaggtagacaatgaaaatattacagactgtattttgaccttatgggagtcatttccgtttcttagagacaaaggatttttcttttgaaaacacagaaggaataaaaaatgaggttatcaaataggtagctggacttcaaattatttggtttgttttcttaaactcagcaagctcttaaacctccaaaacacatttttacataaaaaacattttattctacagtggatccaaatatactattttataagaggcataaaataatactaaatcttcagtggtattttctgtctaacagctataaagctatgatacaatggttaagctaagctagatcagatttctcaaccccagcactattgatgttttggactgcctaattcttgggggtggcgggtggttatcctgttgactgtaggatgtttagcagaatctctggcctctgggcactatcagatgccagtaacaccactccctcaagctgtaataacaaaaaatgtctccagacatgttccggtgagggacaggggatcaaaattgactcaagtgaagcactatgagctagataaaggagcctaattctagttagcctaagactgatcttgccacaaataaacctatataaatttattaggaaacctatcaaggggacacagcagctgtgaaggtggtcttaccacacagtgaccttttcatgctaagtatcttacatcttttattggcttagccaaaagcagaggttaaccaagtgctcggtcagactcaccctgtggaaaaatcaagatggtaggcatggcctgctgaatataaaactggatggtataactgagaaactgaattctaactggagctttcaggctggtataaaaaagctacttcactgttctaccactgtattcactaatagataacaggggaaaaggctaaattattaaaaaattgtatatgacaaaagaaaacaacaggtgcataaaaataatctgaagggtaaactttaaagttataactattagagattatatttttaagttataaggcatggcacagacaacttatatttttaagttgcgaaacacggcacaggcacataatgaatctagttcaactggccctatttttgactttttaaaaatattcatggatggggaggctgcgcatgtgtggggacagggggtacacgggaactctattttctgttcgattttgctgtgaacctaaaatcactctaaaaactaaaatctgggttacggatagtagcactgggtttttttcttaaataacttatcaacatagctgttgcctcaaaatacccctaaaatgccattaagcacgtccccaggaaatcttcactttgcaataagaaagaatttatgggctggtacctctttggcgacggtgtgccagtgaagatgagtttcgcaaacatccatcctctcctggtgtaagaatttgcacttgtcaggaacgagaagggcatcacttacaaactcaccaactgaaagaaaggaaaaccacttcccgtcattccatctgtatcacagtgttcttaccgcagaagacatcaaggaaagatagacttcaagacaagttaaacagccttttaatgcctaagcaacccaatcaagaccctactacctttagaatgttacgtctggcctccttaagcaactccgtttcttgccacttcaagtttgatggttaaaataatgcctaaatgctgcaagtgaaattgtcccttaattaatctgaatttcttgcttcaaaattaatcctaaaaaagctgcttaactagagaaccaattaccattctactacaacaggggagtaaaatataaatattgacattgtctaggtaagcatttgagcagaatcaatataaatccctacttttctttcttggacattttaatctgcttgtaagtaacagaaattttagcatttttctacttcctaagcaaaaaacccaaaagtgtattttatatatatgtttacataacacacataagagagagagagtttaattcagtttattctgaaaactgtccctcagacttttgttaaatctttaaagaaaatgtatattatgcaaattatttctaggcatttctggtattgaagatataaagatattacataaagtcctacatgaactcagtctaatgaaggtaaaagatggataattaccacattatatgtaagctgtaaacttaatttttgtttactgcaatattcccagcttttagcacagattcttgcacatagtaggcaataaatatctgttaatgaatgaacaagttaaattctgtaatagagataaggaaagtgtcaggccagtatcttgggtgcagtgggaaaaacctcaaagaagaaacaatattcgagatgaatctgaatggtgagaagtagtatgccacatgggaaatgaattgaacttccataacgtaaggatagactctgtcttgcttgccattatacccccacaattcctggcctagttctgtcaaacatcaagaactctattatagaatccaaatggatggatggatgggtagcaaaagacccttcaaaatgagggagcctcctgtgcaaagacagagtaaagaaccagcaaggcatatttgcagcccatctggatatgggtggaagcagaaagcaagtggcaaagggagtccagaaggaagtagcactggggaagcatgctggactccaattttaaagaggcttaggttttggatgccattttggaagaagcaacataggccaaaagtttttttttttttttttttttttttaagatagactctataattaagtgaaggatagatcagcatagtgaaaccatgaaagcagggagaccaccaagtaggtcactgtggtccttcaggcaaaacatgcaagaatagacataaacccacaactcccacggagcaaggaatacagatcgtccacacagcagcaaagacaggaatgaatgtctttctttcatagtacgctatagggcattttctgaaatgcaacataaagagggattaaaagccctaagaaggggaaggaagtaacttttcattctcataaaagggtttaaactttagtctgtttctagctcaaacatgtaagatgtagcatgatactgaagtacttatttcaataagtactatttagataaaaatctaagcaaatcataggggagaataagcactgtatcttgtcattccttaaatctttaaaatgatcaatgatgcccatagcagtatagtgtgtgttgcagggaatgcaaaaattatgagacatggtaccccaaaggctgcaggtgtcactttgcagggaagaaaccagtgagtactgagcacacaccccatgcagctccacagggccacatcacgggttcttttataaacctcacttcccaggggaggaatctccgccaagaaacctaaggctacctaactcaggagattataacctagccccagagataagcattaagatataaattataaggaaagaaataacatgataatgcaaatgataccacatttctcttttacatagaatgatataaaacaaaacaaaacaaaacaaaaacaaaaaacacaagaagacctggagaatggaaagtaaaggtaatctcatccaaaacaaatacaccattcccaggtggatttctcagggtttctgagggctctcagggtttctgaggtcagggactaaccctagctgcttggaagaatacctgatatctgaggcatcccaattttctaggttacaggaggccagaagtaccctatggcctgaagatgcccacctcatctgtcagctctgctcagtcatatttgcaaatgtccaaactaagaagtgatgcttttctatttgacaagtaactactggaaagattaaatgcctgtcatgtacaaataggtcaaagagtttaaaaaatctaatgctggcccaaagctactaaatcagttcgtgagaagagccagagcaggtatcagatacactcgaccttggcctgcaagagttcttgggggcataaatcagacagtaagtgccaaaccacaaaaccaaatcatcttgttttatctgcccttagtcaatctgctgacgactagattataatgcaaagctaaagttaccaaaacatatttacttattcaccaaaaggacatgtactgcattaatctttttgtttgtttgttttcagacaaggtctcactctgtcaccctggctggaatgtagtggttggatcaatggctcactgcagcttcgacctccgggggtcatgcaatcctcccacctcagcctcctgagtagctgggactacagctgtgcaccatcatgcccagctaattatttcactttttgcagagacagggtctagatatgttgcccaggctggtctcgaactcctaggctcaagcaatctgcctgcctcagcctcccaaagtgccgggattacagacatgagccaccacgaccagccagtctgaacatttttaatgaggagttggtaaacaagcttttcttaaaagcctgaattaattaaaagttgccttggatattaggagttcattagctaaggatgttactcttactttcatctggcagaaaatctatccaagagaaccatattcttgaacttgtgtttaggacagaggttggcaaactactacttgtggaccaagtctgcccacccaccacccccctgcccccaacacctgtatttctgcattagactgactataacaattgttcattatgtttataagtggttactgaactttctaacttgcaaaacatttcatttgatactgccaagatggtcttagcttcttatattgcacaaagctaagaaatatgtgtccctcaaaatgagaatggttttttaaaggattaaaactggttacttaataagctctcaggactaatggcaaaatagaaacctcattgtattctaacattaaaataaaatttagcagtggacagcactgcttacattacttttaaaatttgatgaaacatgttagaaggttacacatcagaaattgtaagcgattcaaccacaaaaatctgtttttaaaaacttttaataagcgttaagagtgctaaaagtataatgaagcctttttcaccaactggcttagcacggtttatattttctctttttaattaaaaaatattgtacttaaaaatctttgctaggacagcagttacatggaaactgtactttctactcaaacttgctgtgaacttccactgctttgtttttaaaaacaaagtttattaattttaaaaagcctatgatcgtatatacctggagtttctctccacagccacgtataccttatttttataaatgcttctgcttatttgctttgatctttcaggtaaaaagagttcttaacagaattctgatgtaagagatcaaagactaaaacaaattaaacatcataatgagaaatcatgttcctgtttacagcaaactttaggcaatttggcaccatttatttcaagtggataaattcatcaatatacagtatgcatgtttattgagaaacatacaacctggtttcttgctaaaacaattcacaatttatattcaaaacgcatgtcacacaccacacacacacacacacacacacacacccaactgaaagggtgttttcaaagctaatgaacaaaatctgggtctggcttcttggctatgaagtcttggcaaggtgaacaaggatggcaaattcaataggagtctgcaggcctcaatctgctagctctttggtggtctttgggaggactgtctagctcaaattacctcattttgcagatgggaggaaaagagctcaggtcaagtgacttgcccacagagccaactggcagaagaactagactgaaaatccaggtctccagttctccatccaagagtggtaactcaactcactcatttaaactctgttcaaaatggttcatttggcccatttcctttggcttttacaaaagtagttcacttttagactgtgaagtactttaatattataatctacaatgtggtcaatttgacaataaaactagacttaaattagctagcaagccatatagaacagctgggaatgcagtcagcggcagagaatagaccacatgtcaaaccgtggcttaaacacacggtaggattatgtatctcacctaagaagtgacactgaagctagggccactgcagatattccatgatgccatcagggaccagcgtattcctatctttctgtactgccatcctgagcacgttggttttatcctcgtgttttatggtcacagaaattcaagactctgtgtccaagttccagacagaaggcaggagaaacaagacaaaggtgaaaggttttctgttgttgttttttcctctaataaagctttgctgttacttgggagggacatactcctcagcaaattccactgaggccatatgtgccattactgtgatctggtcacatgcacctgcaagggaatctgtgaaagtattttcagcagagcacattgtcaccctgaacaaaaaaaatctggaattcttttagaaaggaaaaaatgggaatgaatatcaaacaggcgagtagcagaggctcccacactatggaatttaaagtatatttttcgatttctttatgttgtcttttcaaaagacagacagaattccaggaagcaaacagaattcagagtaaaaagtactgcaactaaaaccacagtaacttcccaatccatgacattgggaagaatgagaagggaaagatgtatcaaaactgactctgctgccaggatggcggcacctgggggtgtcatcccagctacttgggaggctgtggtgggaggatcacttgagcccaggaatttgaggccagcctgcataacttagagagaccctacctctaaaaataaatgtttaaaataaagacattaggccgggcgcggtggctcacgcctgtaatcccagcactttgggaggccgaggcgggcggatcacaaggtcaggagatcgagaccatcctggctaacacggtgaaaccccgtctctactaaaaatacaaaaaattagccgggcgtggtagcgggcgcctgtagtcccagctactcgggaggctgaggcaggagaatggcgtgaacccgggaggcggagcttgcagtgagccgagatcgcgccactgcactccagcctgggcgacagagcgagactccgtctcaaaaaaaaaaataataataaagacattaaaataaaaaaaaaacagactgctgaagttttgagcatcagagtggggttgagtagattaatgtaaaagattctagagccatacacaggttcttcaaggcacagattatttgaatatcagattaaaagacaatatttctatgaactgctggggactaaaatgatgttggccagaatcatgggaatgaaaggccaaaaatgcctgaggtctttggacttctgcccgaggtgtgccctctcttcctcatctctcaagaggtaaagatgattcaagaaagtgggggaaatgttctggcaatgtaattactgtaaaatgccaaagcctcggtttccttgtgctatgggcccagatctgccttgtgaagataaaacaccagtattgttagtaactctgaactgtgtgcctgccaccaccctcaatacttcacgtgcgtcttctctcaccgtcctcagaaccacaccaaagcagctacaatgatttcactttataagagaaggcaagggccgggcacagtggctcaagtctgtaatcccagcactttgggaggccgagacgggtggatcacaaggtcaggagttcgagaccagtctggctaatatggtgaaaccccgtctctactaaaaatacaaaaaaattagccaggcgtggtggtgcatgcctgtaatcccagctactcagtaggctgaggcaggagaatcgcttgaacctgggaggtggaggttgcagtgagccaagatagcaccactgcagtccagactgagcgaaagagcgagactccgtctcaaaaaaaaaaaaaaaaaaaaaaaaaaaaaaaaagagagggtgagactgagagactatgtaacagtccaggtcacatagagagtaaatggcagaactgggagaattaaatgaattaatatccctaaagtactcaactagtgcccagaacaaagttgctcaataaattatattaatagtatccttctccccagtatctatctcatcaaccacagtagtttctcataataataatcatagtaatcaaaacagcaacagctactcttcatcattcactaatcacctatttcgcacctactgaagacactggggttttatatgttcattgcaccatcaccacctacttgtagccccacagagatgacatggtactgttttacatgtgagtactgcttatgatggggtgaatacatgacagcaatcaacacagcggggtggagtccctacgactggagaagcagagaatctgagtgatcaactctttcaactcttgcaccgagtgctggtcctggctgggagggggtgtttcctaaatcccctcttgcagccactgtcctttatccactaactcttcactgcatacttacaattatgtctcagtgctaagaatacagcagtgaacaaaacagataaaacgatatatgatcctagcggggaagcgataaaaaatacagataaaaatacagtgtctgttggatggtaataaatgttacatagataaagcagagaaaggggtggtttgtttgttttttctgaggggtgaaattttaaatagggtggtcagggaatgcctacttgaaaatatgacatttcagtgaagacttgaggaagtgagggaacaaagtattcagaatcaaagggaagaatattctagccagaggaagcaacaagtattacacaaagtcttgaggcagatgcatgcctggtgaactcacagaagaacaaggagatcagtgctgtcgtggaggaatgatgtggaagagatcagtgggcaagcgagtgagtgacagccaggacaggacagggacagctgactgcacggggccttaaacattgtccaactctggccagtactcagagtaatgctggaaggctctggggtggttttctaagctaattattcttgccctagggggtcaagactagaagtgagaagaccaggaagggggctctggcattaatccaggtgggagatgacaatgacttggaccaggatgagagcagtagaggtggtgcgtgttctcagattctggatgtcgtctgaaggtcagatctaaataatcaaatagaaaggagtcaagaatctagcttgtttctattccaacagctagaagatgctttatactgaagatgatggaaaagtctggacaagactttcctaatttttctgtgtagatgtgtagacaggtagaacttttgagaattatgtacttactaacttgtatacactagatatgtgtatatgaaaatgacagctacagataaatgttttcttaagtgattttttattttaccatttcagactcttactccacaaatttttttgtcttgaatgtgctcattatatgctatcttttgtaactttcacattaacaaataggctgggaaaattttcctgggaggcatctgtactcaagagacgggacgattacttcacagaaacagccaaacatttctcaacaaactttccatgtgataaaactgttatggttttagcttcagagtgtgggcagttactgggttctcaaagaggacatgagggtgaattacacatccttttaaaaagtggctgttgccgtcaccagcatttcactgtaactattaccggataatagtgagaactgacagatgggattcttcagatgagaactatttgccagatggtaggaactaaatggatcaagataagcaaaaaggcaaaagaagtgaaaactaaaagttttacctaaatcatctctccaacttttccaagtgcacagatccagcctcacatacgtaccatatacacacacagatggcagagtgagtataagacagaatagtgctggccgggagtggtggctcatgcctgtaatcccagcactttgggaggccgaggtggatcacaaggtcaggagtttgaaaccagcctggccaatatggtgacactccgtctctactaaaaatacaaaaattagctgagcatgttggcgcgcacctatagtcccagctactcgggaggctgaggccgaagaatctcccgaaccagggaggcggaggttgcagtgagccaagatcacaccactgcactccagcatgggtgacagagcgagactctgtctcaaaaaacaaacaaacaaacaaacacacacacacacacacacacacacacagaatagtgtttaacccaggctctgaataacactggtcttaaaataataaaaatagtgcaaaggatttactttaaaaaagagaaaagaaaaaaaaaaccacgggaacaaaataagtatttatggccaggcatggtggctcacacctataatcccagcaatttgggaggccgaggcaagtggatcacctgaggtcaggagttcgagaccagcctggctaacatggtgaaaccccgtctctactaaaaatacaaaattagctgggcatggtggcgggtgcctgtaatcttagctactcgggaggctggggcaggagaatcgcctgagccggggaagcagaggttgcagtgggctgagattgtgtcattgcactccagcctgggtgacagagggagactctgtctcaaataaataaataaataaataaataaataaatatttgttagcagtcttgcagcttttaaaaagatccatataggtgtgggttaacaaatttttttatattttttattttttatttttttaagaaagagtcttactctgtctcccaggctggagtgcaatggcacgatcacagctcactgcagccttgacttcctgggctcaggtgatcctcccacctcagcttctcgggtagctgggactacaggcacatgctaccatgaccagcaatttttttgtatttttagtagacatggggttatgccatgttgcccaggctggtctcaaattcctgggctcaagcaatccacctgcctcagcctcccaaagtattgggattacaggcatgagccactgtacccagcctgggttaacaattctgatacggctacgcacatatactgaaactgaacaattaagtacatagatggtggatggagtgagaatttatacataaccaaggaggagagatatagtgtccatgtggtaatacgttagagtaggaaacatccggatgaacttgtatttagcttaatatagactagatattatagcttaatataaatacaactagttagctatagaaatatttatagatctgcataacataagggtgaacatggacaaatacattgccttgctctatcaactgagaagtcttaaaagcaaagaaactccagtggcaacgagcatccttaacatccagattttaatactattctccaataacattactctccaataaaaggaacaagggctccttggaggaacagctgattctaggattagggctgaaaatatgcaagatgagactgcagcatcttgtaagaaaaaaaaaaaagaggctatgtcaaatgagcataggaaccaagtgaaagggcttctaatagctaaagccggaataatttgagcaataaaaattatgaagtagtgctggattagaaatcaaagtacaatgtaaatatccatgagtctaaatgactgaatgaatgaatacataaataggaaaaaagagacaaatctcctgcgcagaagaattccaaataatttatgtagatactctgccctcaagaaaatgaagcataattctctgctccttaattgtgggctgtgcaaactgacttccttccaaagagtagagcacataaagtgggaagacgagtaattttcaagtggagaaactcaacaaccaccacctgagccaggtgatcaaggtcaatgccaacagggctgtatcatgttgataaacacgtacccttgatatgatgtgatgaaatgggcattttacctctgtggtcttccttcttaaaaccaataaccccaggcaaagcatgagaaaattcccacagaggggaatcctacaaattatctgaccaatacaaaacctttaaggttattaaaaaactagagaagtataaagaaactgtcatagccaagaggaaaggaggctatggagacctgacaattaaatataatgcgccttcctggatggcatcctggaacacagaaaggacattagacaaaaactaaggacatctgaataaagtatagactttagttaataaccatgtatcaaaattggtttactgactgcaacaaatgtaccatattaatataagatgttaacaatagggaaaactggatgcaaagcctatgggaactctctggactatcctctcaattttcctgtaaatttaaaactgttgtaaaatataaagtctattttaaaaaaatttaatggcttgatataaaagttcacataataaggtgtcatgccaaactcctactgactgcaatgtggatggcaccaggttcaagagccagaagaggcccagagctagtgaaccgtatgtctcatagggttttactgggggcttgcatacagggtagagagtccagtggtggtgggttggacagaggaaccgcagccgcttgcaaaaggcatgtggtctctacagcattctcatttaacaccctccccctaacaatctccacctggcaacttccacttaactcataacaaagggtctcaatccccggcgaggcccatgttccacagaaggagatgagggctcagatgttccttacagataaggaatggctctctgggttagccactcctggatttctttgttgttgtttttttgttttgggttttgttgttgctgttgtttgaaacagagtctcattctgtcgcccaggctggagtgcactggcgtgatcttggctcactgcaacctccacctcccgggttcaagcaattctcctgcctcagcctccaaagtagctgggactacaggcctgcgccaccacgcccagctggtttttgtatttttagtagagacggggttttgccacattggccaggctggtcttggacttccgacctcaaatgatccacctgcctcggcctcccaaagtgctgggattacaggcaccggccaccccgcccggcccactcccggatttcttaactcagaactcagaatcaggtgcacctgccacacaggatcattgtcagggcatgttcaagtcaagtgatccctgtcaggtgcatctaccatacatagaggcatacctatttgattccacatcaacattctagccttcaaaaaaaagtctataaaattattgtagttgaaaagaactagaattaaaaagagcttaccaactcaggcatctcatctgtggtatctattaataactagacagcgcttggtttgacttttttttagaaaaaaatataagtaatgtggcatttaaattttttaaaaattcaagaatttcaaaattatcacatatataccgaaaattctttgctttccaaatttaaccttgtcttaggaatgtaaactaactggtcagagaattcattcccctttacaaatgaggaatcttgagcctgatgaggtttgcacaaagctaatgacagaggtgggctcaactctgaaaaccgactctcattccaatgttcaggaccccaagaaatgttacagtagtcttactaattttgaatgacagcttcctcattaaccaacccaagataagttataggtgcttttttgttgcctctttttgactgcactattagtcatatcttgattttatcaataacaggacttcttgttacaagtatttaataattccaacattcgttaaaagatggaattgtaagagtaatagttgttaaagctttccagattaggggttttcaaactcaaaccatgcttcaaaatcacctgggatcctgatcagtctgcagattcatcttctccctagctccacagcctagatctgatttacgtgttctgggacgcgcctgaaaacagaccttcccagggtggctctgcttcaggtggctcatggatcacactttgagaaatgatatttggagcagggcttctcaagctttacagtgcctatgaatcacctgggggccttgttaaaatgcaggttttgattggacaagtctagggtgggactgagtctgcttttctaacaagctcccaagtgatgtgattcagctgttccttccggcagtaagggtctacttaagataacccattacaactaatctcattaaggtttttaaaaattttaagttacaagttattgctttgtaagacactctttgcttacccacttttaattatacagtttagtgttaagtagattcatatcgttgtacaaccatcactaccttccatctccagaactgttttcatcttgctaaactaaaaccctgcacaccattaaacaactccccattcccccacctccactccccattcccccacctccactccccattcccccacctccagaacctggaaaccaccattctgttttccatctttttgaatttgactcttcaaattcaaaaaggtaccgcatataagtagaatcaagtatctgtcttttggtgactagcttgctgtgtccttttaaaaaataaaaattttcatgcttctcttccataaacctgcatctcatcctatagatttgtcacttttggcaccaacttaaggactgagcgccttttcacacatccctaagagccaagctgctcctggttcgccttttgtttaattatagaagttacaaaataaggtagaaagagttctagatttgaaaacaacacaatgactcaagcagatcaagtgatttccaaatattaaaaggtgatatgataaatgcctcctggccagagaggtgcacatagggtgagagacaagaataaaaattaaaacttaacataatttgataagagatcatctctgctactgctgagtattactaaataccattctatgcaggtccatgtaggatacaaaagaaccgagatatagttctggaccaaaacagcttggagcagctttgtctcacagaaatataatagaggccacatatctaatttaaaatttcctgtagccacattaacataaaaaggtaaaaagaaacaggtaaaattaattttattaatatattttaacccagtacatcctaaatttcatcatttcaacatgcaatcaatgtaaataattatcattaagacattctacatttgtttttttctcccagactaactttttaatatctggtgggttttttatactcacagcatagtttggactagccaggtttcaaatattcaatggccatgggtggctagtggccaccgttgggcaagacagacttagcatcagattttagagatcaataatatatttcaaggagtagtgacttgaatgtggacaggttggggttatgggagaaaatctaaagccaaagacacaaacctaggcagagaaaccataataagcttgaatacactgagactgcagtacaccattttatgcgctatgctatcttaacgcatacattttagtcaatgggaggcatatcactaggattctatgttaccatcattaaccctattgatcagcaaactgctcatctccccccatttctcttgttgcagttctcatatcataaattgtatttataggtgtgtgattaattctaatacagaaattaatttaaggtttcctttagacttgaacctactttagcttagttcagtcctctgtatcccgagagatgagctgaaaaagcagatatagtagagataattctaaattccctactttgtttcttcaaaatataggtattctcactggttgctttctcctaacactttcctttctttctgccttatttaaaaaaaaaaaacaaaaaactcaaagcctgatagattttagagacgcaattaattaaggttatatacggggctttttaaaaaccacataattgccgacaaaataccaaccaggttggtgttccgtgaggcaaaagaaccacaagtcattaccaaaaccttaactcatatgggaaggtaaaaatatacagcatgctgttttcacataccatactcagaaagccatgtgcgagggaggctataatcaagacaggaagaggcattttcacagataacttcttaacggggttgtagactgtcactctcacgcccctcacttgttctttccaacctattaccatctggccttgctccaacaatctgcaactcttctttcaaggtcaagaacaacaaatgccatcagtctcttctcagccctccagttctctgactactctgccacattctctttttttttttttttttaaagagacggggataccctctgtcaaccaggctggagtgcagtgctgtgatcatagctcactgcagcctcctgggctcagacaaccttcctgtctcagccttccaagtagccgggactaccggcacatgccaacatgcctggctaattttttttttaattattttttgtagagacaggggtctcgccacgttgcccaagctgatctcaaactcctggcctcaagcaactctcctagcttcagcctcccaatttgctgggattctaggcatgggccactgaacttggcccacttttcttctttaaattcaatcttctccagtttccaccaatctatctcaagccaatcattctttccctctcattggctcctcttttcataattctgattataaagtaaggctctgtcttctactcttcttgctttctcactcagacatatcatccatgcctaagggtcaacagcctcctccactctttcaattctgacctttcacttagcattcccagtcgcttgctgcatgcttccaattgcagggtattaattacttttagcaaatgtactagaatcaagtgcccaactgattatcaaattccggaagtgtacccaaaggacaatgactaattcctcattgggtcaaagtctttcctatgtggaagcaagagaaaggaacagaactaacactgaacattgtgaggagcccaaaacatgactcctgctgaacacattctatttggttgtagaacccaaccaatataggccccgttgatcgatttccccacaacaagaggaggtcataaaaatcatgcttccactttctcaatagatacttatcgctcatgaatgtctgtgaatcagaagaccatgggactataactctactccactcaaactctccatactcccaaagctggacctcatggtcctcagatcatgtaatactcagacacagcactccagtaaaccactttctggccagaaactcatccttcccatagttcctctcccttccatccactacagcttgttcatcatgatcctgaggtcctggatgctgcagcactctctgcagttatcaggggaggcttcactgccttcagttcatttccctgccagcctggtctaggaccctcagcacacacactcatcactgcacatatcaccaacgaccacccacatgcttttgatgcccaggctcatttggtccagcctatttctctcctaagtgtgagactcaataaatacacaaccaccccactgtgctcttcaagagcttattaactgcctcttttagattctcctgggtatagtccagacttaaaatgcctcactttgggagacaatgtaatttaaccattggaggaacaaatgttggtctatatatttcaggcattttccaaataaaaacctccaagaaaaagcaaacttgtatcttaaaagatgcagaactatttagggcaaaaagtacacagagaatgagaaagaaaaaagatgtcactgcatttaacaaaagagttaacaatattgttaacaataacaagagttagccatgaagtaattaggatatagtacttgaaactggcaccaccttttaccaggcattacaatattgctatgagttcacaaagctctgttagagcagaggaaaaagaaggatttgaattctgtcactgtactagcaacaccacctagggatgaggaagacaatatctaatagaataacaaataaagtaagtatacatgattcatcaagctcttcaataaaaatgtattttagaatttatcaacatcccttttgaatcatgtttcaaaaatcacacaatctgttcaaacacggatagacccccagataaatcagaatctctctctctgttaccacgcctctgtggacttagaaatcaccacttagatttgtaaacaaggcttagtttcattattgtaaatcaatttggcaggacttatcactccacagagagctgaaataattgaatttctggacttctaaggaagaaggtttaagtacattaaggcttccaaaaggaagatcaccaactcttctttagcagaaaatgcccctggagaattttgaaccatttcttgatctagtggcaactggatgttatcagtggcaactaaggtatctgtctacacctgctgaggctcacaagtaaaaactaaaaagtactgtgaatctctgtgataatggagcgtaaagctaccacttaagtctttattactagtaagtaacggattttaagaaaaaaagagatactcaaatctatctatagataaccaaaaaaccaaacaaaacacccagaaaaatctaaggttgaagaacatatataatttgagacttttgaaacaaaacacccagaaaaatctaaggttgaagaacatgtataatttgagacttctgatcagagccttcctcaataatgtaagtttaaaaactattaccaaagtgacaagatcccatgtcagatagcagaatgagaacaaggctactcttcaacttagtcatcctcttttatcactacaacttcaatcatagatgtaaatggaaatttctgcttcctttgctacttttctgcttgactgaattttataatgaaaaacgtctgttccttccaggcagagcacgagtgtcattcaaattgtacacaccaggcaaagagtgaatgcatttgtttagatgcaaaaatcatttaaatatgtgtcattataggctgcagcacatttgcggattcggcagtttaaaattctcttaagcaataaagcaaggcatcaaatgaaagtgcactcaggcttcaaacatcttcagactatgttttcctgtttgcacacagcgagccccgccttcctttcctgaccccactcaaacagaaagcagtggaaccatgccctagcccatcctattaccccaaacgtcttccaggtcagcaatccaaagtcacgtgaaagctccatcttcagtttccctctccagggagcaaatattttgaagagcaagcattccaagcaagcagaaactcagcctttaaatcaaactaagcttaaaagtaaggtcctgccgcacacagaaggcaacagaaaagtgtctgaagagatagctcccattttatatttaacatttagaaatgagaaaactgtgtgtgattaatgcttataattagagggggttaacccttatttcaaataatgtagttcctgtctttcatttaaaattataaagatgactaaaatgtacatgaaaggaaaattacagttaggatctgctgtgttttaacccagaactgtggttttttgaagaaaatgctggaaaagattctgatttggtaagaatatctggatatgagaatcttctaagaaaggtgatttaccattttcaggccaaaggcagagagtttctaacaatgataaaattaacaggctgtaggatcttcattctctaagcttcaggtgacccttttaatgactaaataaagtgtgtactcaaggtcacccacgaggaagaaaaaggtcagttccctctcttgagggaccccctccccactcacgctattacacagcaattctagagattcacttcatttttggtttatgttcaaactgtctggatatttcagggccttcgcttttaagtttccataatagggcagttgactatttatataagtccctggaaaatgtgtatttttaacgtcatctagagtaggccacctttgggggaaaacagctaatgggttaaaaagccaactggtgtaccaagtatgtacaaaagacatcttttataacagttctcacgtgcaaaagaacattcattaagtataacaataaataacaggcaatatgtgcatttttccagaccctaagcacttgataaagccatattgtcattttacactcatttttagtagctgtttaattggtattcctgtataggacagttttgtaggtttccggattatttcacattctcttcttcctagttataaattttggtacaactgtaagctctcctcacactgtaataattacattgctgagaccacatctgtttttttaaaaaagatattttgcaaaaaatatatttaagttgaagtatctgaaatacttttcaacgtcaaactttgagaggattatgcttaattatatatcttcacatctttaaattgttaaaaatgaatgcataaatatttcctagggatttatgcttgattcatttgattcttacatactagttgttatttaccggcagagaaagcaaaagcaaaaaaaaagaaagcaaaaacaacaaaaatagttgattctggtgctagtccagaatcaggttgatttctgcatcaatagcagggtttctacattaaattcattcaaatttaattagttctctgcataaaatcaagggtctaggagaatttaataaaagctgaaaacaatcctatcctttgcctgaaacagatttttatcccaaatggtactcagcaataagccaacagagaaaaatggaataacagacatatgccatgttcacgagttctctgtttaacctaagaagtctgaatttgccattttttgataaggaactggtgtacatcttagaagaaatattccattgagtctgaattcttggtggagcacccgcagaaagagaaccagtaaatagtatgtatgaggcctggcctggacataatgactcaggaatcatcaatgcaggcctctgaaaaaccactgcacttatgagatctcctagcaagtatgtgttgtgtgagaaaatggacaaccccagggtactcctattaaacactgatatttagaatttctgaattctgattctaaatattttgcaatatttggaatttctgaatcctaaatattgcaaaaggtggcgcggggaggacggggaagggagcctgaaaggaaaatggaggacagcagaaagaaaatcagaagcagcagaatgacatcagtgtggggagaatgcacccatcaaccgatgccactgagagactgtggaggacacaacagtgcccagtgagtccgacaaccagaatgatagcaaagagctcattccctggagctcaaggaacagatgcctgataacaggtgactgtggagggaactggaggttacgaagatcacacaggaacttctgactaccatataaagaagcatatctgtgaagagacagagcgagggtggaagttaaaggaatacacagagttgaatgactggagtgagggatcagggagctctaaagaagaggaaaaatatgagaaggctaaatactattgagatgtgaaattaaatacagggtcagtaggccaagggtctttatgaagtcaaagatcagatacaatgagagtaaaggacctactgaagaagctgtgtgcacagatgcccaggaattcagactcacctaagaatttagaacaaaggtggaaaaagaaaactaagctcaaattatttaaatagtacaacagggtaacttcttgacatactgaacatgagcctattcatgttaaatatgcttggagaatatcattagtccatggcttacaatcaattctaagctttcaagaaagcaagagctacaggacctattcataaaaatatagcaacattgggaaactaattatcttcccagctgataaagataccatccaataaatagggggatcttcagtgacatccaaaccttcaaaaaatatattttaaaatgttataccacgttctcggaaggtagttaacactaaaaaagatttgggggaactgaagctgagtaatattcttgaaaatacaggtacctaatcaataaataaagagaatgccccccaaatttttcatggcatgaaaatacttaaaggtttaagaggggagtacctacatctattaatacaccaaacacctactgaaacgccacattcatgtaatcacttaataaagacattaaaataggatgacaggagttcatgtttagcatttataaatagtatcctaacctttaaggtacaacataagaatctgaaatttctaaaatctattatcactgaataatatttagaagcagatttctgtgaaaattaattcttaaggccaggcgtggtggctcacgcctgtaattccagcactaggccgaggcgggcagatctgttgaggtcaggagatcgagaccatcgtgggcaacatggtgaaaccccctctctactaaaaatacaaaaattagccaggcatgatggcgtgtgcctgtagtcctagctacttgggtggctgaggcaagagaatcgcttgaacccgggaggcggaggttgcagtgagcagagattgcgtcactgcactccagcctgggtgacagagagactgtgtctcacaaaaaaaaaaaaatctttatcattagccttaaaaactaaggacaatgaaactattataaatgaatctaatggtatgttttatctctaaacacagatgcctctgatacactgactttttactagacatgtgtaggataggtttaaccctatttctggagttgaatgttctttttattaagatccaaagacacttggtttcttctcttctgagatccctatgttacttcttggttgttacataaaacctgctcttcctttgttgatcaataaggagtaagtaaagtaaatgattttgccataatctcagaaattcttttaggcatgtgaaattgctgctccacatcttctgtctttctaatgtttgggctattctttcttttccctttccttttccaatatttggctacatcctcaattcattcattaaatctatatatttattaaatatgtactatgtaccagacatgttcaagctctgggaatatttcagtgaattgacaaaagtctcaattatcgaagagcttacattttgaacaaaaagcaattatttcccaatgtttgagcaccgcaggaaagggttaaccatcagcatcatgcactacttattcacaatatagctgcacaattattgtttcctcttatcaggccctcaaagccactgattataatactttgtcccaacctattaccctacaagtttgctagtaaaattcgaagatgaccaggagctatttgcaggatactacaggctatgaaagtattactccagagtataatcagttttttccccaatccaattgtatcatctattaaaagagctaacataataaaaagctatatcctgatgcccagaatttacagcgtaacaaggactaagaaagcaggtatcttagaggtaactttagcctattaatgacatgtgcagtacaaataaaaccacattgaatgtacagatatttttctggacatcgaataagagaaataatcaaatgaattaatgtctgtccaaatcaaaaatctctacaagtgttccaactttaatgaaccaacttagttctattctaattttctattattatttctcaaggctaccaacacaaactactttccctggaacatccccatgaatatatttatttatttattgtttaattttttttgagacggagtttcgctcttgtcatccaggctggcgtgcagtggcgcgatctcggctcactgcaatctccgcttcccggtttcaagtgattctcctgcctcagcctcctgagtagctgggattacaggcgcccatcaccatgcctggctaatttttgtacttttagtagagacggggtttcactatgttggccaggctggtctccaactcctaacctcaggtgatctgcccacctcggcctcccaaagtgctgggattacaggtgtgagctaccacgcccaggccccataaacatttttaaatctacacctcttcattttctttacgtatccctcaggatccacatcatgggtctactttctttcaaacaacttttaccatatgctccagctcacactaccatctccctacctcctatgctcacaacaacccctcatatgacttacattaaaaagtttacaattattaattaggattggaagtttccaacagatttgtagtcaggagagactattcagggaacatgagtctagttttgatcacattgagtttgaagttcctgaacaaacacgtgtcactaaaggagtgaagataaacatgcttctagagtaaaaacaatcacaagtacaaacctctacaacatcttacacagggaaattcagccctaaagtctatcaaatgggcataaaggtaattttatatttgtataatcttaggttatagccaagaaaaagcaaacatcttgtgaagttgagatatagcatacaacaaactcagctcaattaaaccacagtttagctttatctaattcaaagttaggacgcctttaacagtaacttgacttgcaacttctaagcttaaaagaaattttaggctgggcgcagtggctcacgcctgtaatcccggcactttgggaggccgaggtgggcggatcacgagatcaggagatggagaccatcctggctaacacgatgaaacccagtctccactaaaaatacaaaaaattagccgggcgtggttgtgggcgcctgtagtcccagctactcaagaggctgagacaggagaatggcgtgaacccaggaggcggaggctgcgatgagccaagactgcgccactgcgctccagcctgggcgacagagtgagactctgtctcaaaaaaaaaaaaaaaagaaagaaagaaaaaaagaaattttccagattaaaacaaatgtctggaaaccttaaactcaacttcttcctgccatcaaatataggcctccttgatcgatttctccataacaagaggaggtcataaaaatcattcacggccatctcatttagttgtctcttctgcaacttactccctaaactctgtgcttaaataactattctcctgatttttccgctgtaggtcttcccactatggaacatgagcccacccctttcccttcccaccatcctactggtatggttttaccccatatatggcatctgtattgtgagtctgccagaacgctcatacttaggcgtatttttatcttcgtatcttacaacgctgttattttgtacttttggcttttctttgtctacagttaatatttgccccatttaaaaaatttgcctcattttctatgcatccatcaatactgtatctttcccaaacgctccagtagaaccctaagaagcatgctaagtacaggaaaatctttaacgcaggtaatgcatcaatgccattttttcctggaggcctctctcctgcgaccagcctcgttcgtctcctccaatctggactagctgctctccagacggttgcacagctgttgcctgagatttcccttcactatagggtttcaaagccaaagcctaagactcactgacaggagaaggaaaaaaaaaaaaaaaaaaagacagacactcctgggatgcatcaccaacaagttgaaatttatcaggggatatggaagagggaatgtttaatgaaaccactcagtgactaatatgataaaagagaaagacgacagaatttatcctttcactgaacactgaaacaaatattgagaaccttctttgtcaagtactaaaatctgaatatttcctaacagcctttgacactgaaattaaaatacgtcttaatccagactgtagattcatctttatgtcgtttcttatatccatgatgcttatttgtgtacctgaaaaaaagcatattcttttcctcagtgctaattgagaactggctttaaaaattcattctttatttaatcacaaacatcaaataactttttaaaaatataatacgtgagaaaaaaattgtccttaatttcatttcagtattcccttcataataagtaaataaacagttctgcttttatgggtattatctggaattataaagatatgctgtacctaattcacaatagtaaactgaaaaattttaagtccacaaagaagcacttgtttagttcttttcctagggaagaaatacatcaaaagttcccataatttattatgagaagtctatgtctaatatattttacatatttatatactatttttaatgtagttcattatttaaaacataatgaaagcttgggtttcatggcaaaggctgaagttaattcagttaatgccattattttatgttgtatgtaagctactcttctaccccaagaatcgtaataatagctgtctgtaccactctaaacacttccttaaatttcatattcttcatctggctacaattatccacatggcataaaccatagagctctcaatcccaaaatcttaagttttgtcacacacaaattctgttttctactacagctgtctggaaagttatttactggcttgaatggttaaaaaaaacatcaaactcggcagggtgtggtggctcacgcctgtaatcccagcactttgggaggccgaggcgcggatcacctgaggtcgggagctcgagaccagcctgaccaacacggagaaaccccgtctctactaaaaacagaaaaatagctgggcatggtggcacatgcctgtaatcccagctacttggcaggcttaggcaggagaatcacttgaacccaggaggcggaggttggggtgagctgagattgtgccattgcactccagcctgggcaacaaagagtgaaactccatctcaaaaaaaaaaaaaaaaaatcaaactcaagacaatatctcaagatttttatttgctttggaaaatgacacgatgagaagagggttctgaagacaaaggggaaaactgtttcctttctctgcttggggtagggactgatggaaacacagtgcttgagaaagatgctcagaagcggctagagtagaaaaagaactttgaagaaagtccactttcttctttgattcctcatcataaccatttgtaatcatttacctcagaataaaagagaaaattccacgacaataaacacagcttgaggttagctagaaatactgttcacattaaatttatggtaaaacagcaagctgaaatggtgtgggaattatctaataatttccaagactgaattacgcagctataaagcaacagcagctgtttactggttggcccagaaaagttcacatttcagaccaccagatcagacataacagtattaattcctcatacagggagaaatttttgaagactcaacataacagaaatccagtgttcagctgatacgttattaaatctgacggcatttttatggcatttttaaactatgacacagcttcaggaagtcctgaaaacttgagcctctaaaggcatttttgtcttttttatacaacataggtgcaaaaagctgaaaaatgtgaccatgaccgtgtgaaatttaaattataccttactttttatttttacttctgtggatgccagtgtctgtcttagtctgtttctccctatatacactgtatatggaaaccaactaaaagcctatctaggccgggaatggtggctcacgcctgtaatcccagcattttgggagaccaaggtgggtggatcacctgaggtcagaagttcgaaaccagcctggccaacatggtgaaaccctgtctctattaaaaatacaaaaatctgctaggtgtggtggtgcacgcctgtaatcccagctactcgggaggctgaggcaggagaatcacttgaacccgggaggcagaggttgcagtgagccgagatctcaccattgcacttcagcctaggtgacaggagtgaaattccgtctcaataaacaaacaaacaaacaaagcagcatccataagaaattaacacaaaatatgtttagctgttcatttgaaagcaaatgactggggttataattcacttgtaacacttaataatctcaaagttttgatttgtgaattccattatctcttggagaaagctacaacacacatataattagtggtctaactcaaatagtgctggaatttcctatagaaatggctaagcatgaataaccaaagtcgcaggtgattcctaagattctgctcattttttaagtttttttttaagttttttgtttctttctgctcattttttttacatgactgaattaaaatagcttttaaaaaatttcctgctttccgccgggttgtggtggctcatgcctgtaatctcagtactttgggaggctgaggcgggtggatcacgaggtcaggagttcaagaccagactggccaaggtggtcaaattccgtctctactaaaaatacaaaaaaaaattagccagtagtggtggcaggcacctgtaatcccagctactcggtaggctgaggcagagaatggcttgaactcaggaggcagaggttgcagtgagccaagatcgcaccactgcactccagcctgggcgacgaagctagactctatctcaaaaaaaaaaaaaaagaaaaaaaaatcctgctttccaaagattactggtatcttttactggaaaatggttcctaaagaccataatctaggtgcagtactggtgtttaccgctactgagttggtcttttaggccttttcattatttttaggcctgcagcggacagtatttatggggaaaaaatgttatctgaaatctacaacaatatgttatactgagaaatgatacctaaaagtcaaactcatgactacagggtatctttttaatagattatatgttacatgtgaatcttcttttaccacatcaaaattctgattctcaaatacatgggatgattgaattaaaatatcacacaactattcacttatgttacaccatattacttatgcaccaggctcagaattacacactaatactaccaccattaatagaaaaacagttgtttctttacccacatcttcttctcattcttccccattaaagttactgtcacaacaaggctgtttatttcacctgggtgcaggcaggctgagtccgaaaaagagtcaggaaagggagatggggtagggccattttgtaagattcgggtaggtaaaggaaaattgcagtcaaagggggttgttctctggggggcaggggtgggggtcacagggtgctcagtgggggagtttttgagccaggatgagccagaagaaggaatttcacaagataatgtcatcacttaaggcaaggaccggccattttcacttcttttgtggtggaatgtcatcagttaaggcaggaacaggccattttcacttcttttgtgattcttcacttgcttcgggccatctgggcgaatacgtgcaggtcacaggggatggtttagcttgggctcagaggcctgacagttacagaatctctttattgtcacagcatgtagctgtggaatactatattatcatactttttaccatcgttgagtcttagtttttatgtttctccttaatgctcattacccatccttatatcagtttttctctaggtattttgggtatctgaaacttgttctctagcagattctacaggaaaataatgtgaaaatatgccctgagttattgtacgttgatatttatttcatgtgatcatatctgaatgtcagtttgattgaatataaaatccttgttttggctgggcatgatggctcatgtctgtaatcccaggactttgggaggccaagatgggtggatcacctgaggtcaggagtttgagaccaacctggccaacatgatgaaaccccatctctactaaaaagacaaaaaattagctgggcgtggtggcgggtgccagtaatcccagctactcaggaggccgaggcaggagaatcgcttgatcccaggaagtggaggttgcagtgagccgagatcacgccattgcactccagccggggcaacaagagtgaaactccatctcaaaaatgaataaaataaataaataaataaataatccttgttttgcattggctttctttgatatgttaaatgttgctttattttcctttggcataaagcactgctgtcaaaaaactcttattaaaatatagtttctttgtaagtgaaaaacaaaaatatttcctgccctcaaaaattataaacttagttaccaaaaagcaaaaagtactatgtgtatacataaaagcaatatacattcattaccatcttgaaaacaattatttggatataaactttaaaattataaaataatagtattcattataaatgaatgaaaacagtaatgatttttaaaaactactactcttatcatgaccaattacctcttctttttgaaaagtgaactagttcctaccttaaagactttgttgaccctctgtctgaatacctaaaatacatctcctttcttgccttgaaatcttatccttgaaatcttggctcacaatgctacttcctgtcaagtcttccttaaattcctgagctgaaatcccatccccttcaggcccactatcaactctgtaagagggaggcccacatttcacccacctccaggggctcacacactgtgggtgatcaataaaacgtacacaatgaatacgtaactgaccttttattggtcaattttgtaggacttatttctctgagaatattcaattaactacttcctaaggtggaaatttggaaaagcaatatttaaaattgtttaaatagatttaaatagtaattattttaaatggccttaagtagaaattacaggcgcttttactctatcaataaaaaaatcatagctaaatgtaggggtatccatgcttatgttaaactcaggatcataaatcagtattaaaattttcctccatattttcataaacaattatgtggcgcatatattttattacaccaactataagatttgcaaggcattccgccaataactgttatataaaaatcaactaaacacaaatttatctaccaggatgtttatcacagcatcatttataacaactattacaccaccacaaaataaagaaaaccacctaaatgaccataaaaaagagtaaacacattacagtgtctggtgtgatgctacattaaaaattatgctctccaagaatatttaatttcacaggtagagtattctaaaaatgttaggtgtaaaaagcaagtcacaaaacaggaaacgattaaataacactaaaaacaaaagcaaaacatacatgaaaaaaatgtagactgcaaggaagccaaatggttttgattatttttagctagtggttgtattttctcaactttgtacgttgaatatatgttacttttgtaatcagagaaatttcttttgagcacacatttgcaattcttagcatgtactacaaatcagatgtccattagccttgctattcatttttcaaagcaattactaacaagccttgggacaatatcatgccaaataagctgggtttctttttctcacctatcatctaggacctacagagatagataaattctgtgcttcaagaaaatatcagcaaagcccactcataagccataacagcagtttttcaaaagttatcgtttctttttaatgcctcgttacttaatgacacctgaatacaactccagtaaagaagacaaaactgaagatgtaatgaagtataaatcacccatgctattagagctcttatcaatcaaaacattagttgttaaaagtcccagaaagaggacacaataccaggtacaataattaaaatgaaaagaaacaaaactggaaacggagccaagaaacaccactacgcttccttcttttcaaaatgcgattgttaaaaaagtcagtctcctcaactcatcctctgtcctgagttttagaaagcaaatcaagcaggagccaatgcaattgaggcaattatggaacttgggacagggccaaggaagtgctgcagtgagccatggaggatgacctacctagaagggctccatttttttttttttttttttttttttttttgagactgagtctcgctctgtcccccaggctggagcgcagtggcgcgatctcggctcacggcaagctccgcctcccgggttcacgccattctcctgcctcagcctcccgagtagctgggattacaggcgcccgcaccacgcctggctaatttttttgtatttttagtagagacggggtttcaccgttgttagccaagacagtctcaatctcctgaccttgcgatccgcccatctcggcctcccgaagttctgggattacaggcgtgagcaccgcgcccggccgaagacaccatttttataggtgttcttgcttaatcaaatggaagagggcttcactttctaagtcttcctcacccagaaggaatctgtgagataaatgtaagctcttcccattcttccttctggcctgaaacaaatgtggctgccatatgcaattttggagggaaaaaaaattaaggaagatcaagaatcttcctgaagaatcagtgatgattaatgctgcttaaattttgttgaagatcgtatgaatgaacgttattttcttttattttggcatcatggtgttttcaaaactaaagtgtattttcccatactgtatgtataaagctcataaagtacaactaccaagagataaaacaaattaatgatcattctgtgtcgactttcaagtcttttgacttttttctattatccttcaatggtactacatacaaatacaaaattatatgtactgatttcatagtctatcttttgctgattataaaagctactcatttattatacaaagtcatagaaaattgcttaaataaaatcaaaatcacctgtaatcccactgttgggagataaacactgataagatttcttttccggacatgttttcttttacttagtatgctggttctgaagcatgattaacgttgaccattcaaaggtcccatgggaaggccacatataaaggagtctgatgtctctccaaggatggctgattagcctttcctgatgaagaaatgcccagcaattctggtcattccttatgagaccatgatgtaaacaatcaagaacattcaagaatttgcatccttcttgtatgcagcagctgggctcattaaataatgagaatgatgaagtcatcattctcatcacagtgcatgtataggtcccacacatgcatctcccatgacttcaaaattagtaggatttccacagtgcaggtcggtggggagaggaggcgccatgggcaccaattctctagcacactggattacatacggggatttacaagatccttaaagtctacaataaaaatgtttttccatcctcatcgccatctttaaagtttggtgaactctcatgtgacatttctgactattgtgttgtactgatgtgtctcaagagagttgttgtttacataaattcaaagaattaccctggtataaaatgtcacagtattcaaatacatcctttccatgctaaagaagatagctgtagataattgatacaaaggcagccaagaaacccagaaaacaaggcatgcttttcctaaaattgtattaaaacaataaaattcaaaattaatatgaattgaatacctttctcatttgaccatatctgataagatttctggtcattactacttacacatttggaaggtcttaattacaaaatgaaacagaatgacatttaaggtaaaattctttcacttgtaattccttttttggattaagctattaacctgactttgccccaataattcaacagtaatttattttacgcaatgttccttgcctttgctggtcagagacaagtacagaaaagtgccaatttcaacagtggatctattacaccatgaagagcagtcattcaaatggaaagggttgaaagctttgcaaagaaaatattctccttgagtaacagtaatgatgtgcttgaatcacacatgagataattaataaaatgttcacatgattaagatgaatcttaccctctggttccagaggtactaccaaaagcaaagggtgagatgagaaagccaacttattctcaagggaaattatccactccatgggaagaaagtggcaacagcaacctgacatactttccccatgcagacaagaaatgtatagcacatatgtccgaggcaaaatattacagaaaaataatccagtgccacactggatccttcatctgataaagaggttaggaaggttgtatgccacacataacaagcatttttctctcttcaagctttgttttgaattttaacacgcttaatgtttaagataattttattttgtttgctaggtcagtaaaaaaaaaaaactcttgtctaaaacatatatttggatacagtcaagagattttagagcatacttatgttaatgctgaacagtaattctttgttaagcaggaataatatgtaagaatgttacctactactactataaagtagaaaacatatcacatggagatttatcctatactaggtcatggttgtctcctctgtcaacacaacgatagctgtgagtttcttttttagtgctattgtctctaattcatagtgaatatttgttttaaaacaaatttttgtgtatactgtaaaaaacactggaccaataatcaagagagcttggactgtagtgctgactctcccatttatttgctgtgagttatagcaagaaattcaacctctctggatcttggtagttgtatagcctgtgaagagagacgaagaactaacactgcctgtctattaagtgcaagtaaaatgtacatcagttacacctatgtccctatgttacctatgttacacctattggaaaacctatgtttttcagttccttttcctgaaagacaaggcatgctctacatactctaccaggttattttatcaactctgtattatactctgggcttgagacctttggaaaatttgccactacctaagaaaaaagcagcacctatattccttaattctaatctaaggttaataacaaagtaagagacaacatatgctctacttgtcatattagggtctaatttcaggtccaatggaaaaggaccagtgattcataaaatgagaaaatatggtaaaatgattcaacacgccaagtacctacaggaaatagcaaatgattatctagtcccatagtagtcaagaacagttagtgtcaacgtgctcatttcacatcagacacaaccagaactgagaaatttgcttaacatgtcacaagtgacccaactttttgaattatgtacctccacatcaaaggagcccagaatctgttcggaggatgaaagagaaatctgataatggttgatggcaaagccttggcaggaataaactccttccctgagaaagaattattttataggcttctctccatttctccttgccagtctccagcctgtgcttcacagctgggtaattatctgtcagtggaatgatatattttcaagtggttctctttccataatggttaaaaacataaggtgaggacaggtcattaactttactatcaaacaggtatttggtagatgagattaattatttaaaaccacattacttaggctgttgtttccctaaatggtgcataatgcagtgtagcacaacaaatacaaatatttggacagtctccgtgtaattataatattattataaaatcttctgacttgatattgagatctgagaacatcttttatatcctttattacttgttgtactgttcgttcacttggaggtttttttgtttgtttttgtttttttaagagacggggtctcattatgttgcccaggctggtctctaactgctgggctcaagcaatcttcccacctcggcctcttacagtgctgggattataggcttgagccaccacacccagtggaaggagagcttttcagagatgaggaggcttgaagagcaggggcaaaggaagtgatcaacagataggataaaatagacctggggttcaaaggatatttgctacaacaactggcactaggtagtaaataacaatcttaatgtggatttcatctttccatcaactttaatacaaatcattctgaatagaatatgaagcagaaaaatctatgtaaaatgataagttcacttctgaaacatgactgcagttttgagtgtcataccaggagcaataatgcccatccaaagccctacctgttctcagtgagcttacattctaatgaaaatatatttggaatacttcatagaacaggtaagtaagaaccaaaagaaacaaatcattaacaaagcctggcccatcaaattaacagactcatgatctacttcctaacttgtactgaattgttcaatctctgtgtgttatttcttggtgtaataactaagtgagtataaaatacacagttcctggggacagatgacttctatatttttttgagtaggagttctgtatctagaatttaagtgctgcttattttcatctaattaaactgcactttttgatgaaccagaaaagagttgaggccttataaagcatataggaacaaggaataaggaggaaaaaggaaactcttgaattatcagatgtttaagaaatctagttttctacactctcttcatcaattacattgtaagtaaattcaccaggtgaaatcttctttctaatgcccagtgttttcattttatgtctcaaattatgcacatgaatgaacagcaatcagtatgctcttaggacattcatttttgaccatatattacatagatctccggaatcttcagtaaatatccttactttgtaagtttgctgttggattttctttgaaatattccttttaacctttataagaagtcatcagaatatacatcaatatttgtccacaatctccacagacaatctctatatccttatttacaacctgcctactgatgaatacacttgtggaaaacatctagatgtaagataccagagcaaagaacttgacttctgcaatgactggtcacataaaaacaacaactaggaacagactaataaccaagttagattaaatatggagtatgacagtttccagaggaaaagagcacgataccacataaaactactcaatttttttaaataaaatgttgaggtaaatttgaggtttgtgacaaaacaaacattaaacattagtaatcagactgtttcctccagtttgatgtaagcagaaaaaaagccttcccaattccaattcctctactatcaccaaataagaggagtagttattgtagaacagccttttttttttttttttttttttttttagaaattaacaaaatgctgcagcttcacattagattctttcttctagaaagtctatgtgaagaaacacacaaggcccctgttcatgagaatcatctatgcgatacggtaaaataagaattcccggatccgctactataggcatttttcattcaggagtcctggaactggcccaggaatttgtaatttcaatatacaccctgggtaaattcattctgaggcagggaactcaaaaatactgctcctatagggtcagtgcacagaatgtaactgcaagagtccaaaacacagtacaacacagagtggcaatgtgctgaagaacaagtctgtgtatgtgacctaacaggagcatcctctttttcttccctcaagaccaggcccccaatcaacaccagccccacggccggccggctcacctaagcagcggtagggaatcacaaagtggggatgggtcttgcactgcttgcggccccgcttgcaccagttctggatggtcactggttggttggcttctaccacattggtgatctgcagttcagggtagacctgggagagcacacaaaaagaatcaattgttacttgaggcaggggctggcatttacaagcatctaacaagcctccactgtaaggtacaggtggagtgtcccttatccaaaatgcttgggaccagaagtgctttcaaggtctctgactttttccgattttagaacatctgcattatatacttactggttgagcatctggaatccggaaagtccaaaatccaaaatactccaatgagcatttcctttgagcatcatgttgacatgcaaatagttttgggtttttgagcatttcggactctggatttttaaatttgggatactcaacctataccactatccactaagagtcaagcctgctctacctctgaccaagctaaagaaattcagtacaaagaaaaagatagcaaatgaacaagcatctagctattccattcaaaatattaagcaatgcaactttttaatttattgtactcatttagacttaaaatattatttttccaggggagctaaaatagaaacaagagggggaaaggaggattcttacaagcatggggtgatttttgatgtgaaataaattggtgtaggataatagtctgtaatgtcctaaacaaacgttacagtagatatggctggggatattatgtttagtaaaattcaacctccccctatctctcactaatcggacaaacattttacaggatatgacacatagaaagctttctatataaaaatcctgctcttattccaagtaatttacatgaaaataacttatcgaaaagttatcaagggtgtcatttagataaaaataaactcatgaattctctttgctcctataactaactacagccccttgctttgattactgttgtgaatacatcatggtgtttaactgagcacttagaatgaaatgtgaaacttgatcaattaaatcacatttgtgaaatatcaaaccacttctatttattaatgagtagagatttgaaagaaaaacataaacataaaaatctatttcgaaaatgtgcattcccttgcataaaccttgcattgcaacagggtggttgttttgccagataaataacaacgaatagagaagtgacggtataagcaagggaatgattagaatgctgggccatgcaatctcaagtggcaaaagtgagaacatgaggggaattagacacaggtaaaaggtggtagggaccagtggaatctgagtccactgatcacactccaggggctaaagaatgtatggcgcacaggactggagaaagtgaggtggtaataagtagtacttggagagtcaaataattgaaattaaaattttggaggagttgcagtgattggtcattgcaaggagtataatatgaccattgtaagcaatgggtgatggagaatgatgaaaacaaggtcactggagggatgagaatcatgaactgacaaattggaatactggaaggatcattgagatcaatattaggatcacttaagaatcagcaaatgaagcagctacacctgatgacagcaaggcaggagctaaaatcttcaaagtctgaatggtgaacatcgatgaggtagaaagaggtctggagatgaccaacaggtggaggagcaaagtgatttgtctgaaagcatgcacttcaagctgaggtaggggggcttttagggaagagaaaggaagagtggtttggaaacaaaaatgaagaggaaaagaggaaatgaagaggaaaagaggacattcccacctctaggggcaacgctgtgaggattttgagaaaagaacttcgacctgagaaggctacaggagaagtagtgccttccttggagggagaacaaggtttctgagcaagataacatccatggggagttagacgatacacggaatttcactcacaattgtccatgacattcagagggcttgacaaatctaaattaataatcccttatctttgaataaaagtaactgaatcaggctgaatttactgcttccattttaataaggcagtaggagaactatgcatggcttgatgtcaattgagcgtgactcaatctctgtctaaaaagttgatattttgttcatcatggagtttttttgcagtaattttgatttttaaaaatattacattaaaaattcttaatctcaattcctgactgccttgtttacctcaccttagtcccagaccccaaaaaaatcagttaaaaaataaggtactgtgaatgaataaataacactgtggggtacacacctagaaaatggaatgtcattcaacactaaaaggaaatgggctatgaacccatgaaaagacatggaggaacttaactaatattgctaagtgaaagaagcccatctgaataggctccatactatatgacattcttcccactatatgacattctggaaaaggcagaactatggagactaaaaagatcagtggttgccacgggtttgggtggttgggggcagggggaggatgaacagatagagcacagaagatttttagggcagtgaaactactctgtatggtactacaatgatggacatatgtcattatacatttgtccaaacccaaaaaatgtataccgccaagagtgaaccctcagggaaactatggactttgggtgctaatgatgtatcaatgttggttcatcgattgtaacaaatgtaccattctgtgggggatgtttataataggagaggctaagcatgtgtgcaggtagcaagtatatgggaaacctctgtaccttcctctcaacttttctgtgaatctaaaactgctctaaaaaaccgtctattttaaaaacaaaaatttaaaaataaggtatcaatcagtgtagcagcaggggataaactcagtggtagaggtatatgctaagagaacacacaaagaaatctctaaatcagaatcctggggtgggtgctgagagagttattcttgaaaccactgccacagtaacctagctccaaagggatcctgctattaatacttctctttattttactttgttcttaagtatcttaatatctcaatgcaggcactttagatcacagaaaatgctctaaaaatgccactaaaaatttaatattcccatggcttttttcctatataatgaaaggtgaagtggctttttgtacaggaatataattctcccaccgtctttacttgtttattagatcacaaagctgcagcactcatgagtcataaactgtatgacacctgagagtccaccctgagggacatgactttatgtgcagtaaagtgtgagttactgcatctttctaaagggttcttttcactgaaagacaaccctgctgagaatttcctcaggagtcatcggttttctataaacccagtggcaggcatattcacatcatggttccctctatacaacttaaaaccaacgaattgtttgtagggtacaaactgattaccaggagaaaaggatctctttttcatgttggttgcataccatcttcagattcctatggtaatagttggtgcaacagggcagtaactgattaggttgactatttccaagtaggtagaattgcaaattgacaaattaaaatccatgaagacggggcttttccctaaagactagtactagaactttatacagtgatcagccaaacacagaatttacttccagttcccaccaggaaatctagaacatgcgtgttattttctgtgcttcagcttctctctctataacaccaacaatgacaattgttaatatgcagatggatgtggagattacaaaatttgaaccaggccggagacagtggcacacacctgtaatcccagcactttgggaggccgaggcgggcggctcacgaggtcaagagatcaagaccatcctggccaacatggtgaaaccctgtctctactaaaaatacaaaaattagctgggcgtcatggcacacgcctgttaagtcccagctactccggaggctgaggcaggagaatcgcaggaacccaggaagcggatgttgcagtgagctgagatcacaccactgcactccagcctggtgacagagcgagactcggtctcaaaaaaaaaaaaaaaaaaatttgaaccacataaagcccatgcatagttttttcctactgtcctattaaaatggaagcagtaaattcaacctgattcagttacttttattcagagataagggattattaatttagattttccaaacataatgcaattttgctgttccaacatcaggaggtttatttaagggggagaacattagcaatcaaggtaacaaaacttcttctgaagcagagcaagacccttttgataaagcaactgccacatgcacagccaactcccagctcagaaagcaaacaacgaaacaaaacaaaaaaagaaacaaacacgttaaaatttaaaattccaacaaaaattcccaatatcatccctaggtttttattaaataaccccagtaaacatccagagaggaaaaaaagcctttttatgtttacatagatataaaaatatttatatttatataaaatataaatatatagctcatttataaagatataaatatagttcatttatatttaaagatataaatataaatatagttcaacattttagacaagaataaaaatttcatcagaaatacaaatgttctcgtggctagattaagttcctgatttttatcataactatagtagtcctcccttatctgtggttttgctttccatagtttcagtccaaaaatattaaatagaaagctctataaataaatgagttttatttttctatttatttaattaatttattttttttttgagatggactctcactctgtcgcccaggttgcagtgcagtggtgcaatctcagctcactgtaacctccatctcccaggttcaagcgattctcctgcctcagcctcctgagtagctgggactacaggcacccactaccacacccggctaatttttgtattttcagtaaagacagggtttcaccatgttggccaggatgctctcaatctcctgaccttgtgatccacccgccttggcctcccaaagtgttgggattacaggcgtgagccaccgtgcccggcctatatttaattttaagaaagagatagggtcatcctatgttgcccaggctggtctcaaactcctggcctcaagagatcctcctgtcctggcctcccaaagtaccaggattacaggcatgagccaccatgcccagccaacaataagttttaaattgcgcaccattctgagcagtgtgatgaaatctcaaacccacacagtccagaaagtgaatcatccctttgtccagcgtctccatgctgtacatgctacctgccattgatcacttcatcacagcgcttgtgttcaagtaactcttatttgacttaataacggccccaaagtgcaagagtagtgatggtggcgtagtgtcataattgctctattctattattagttgttgtgaattacttactgtgcctaatttgtaaattcaactttatcacaggtatgtacctataggaaaaaaacatagtatatattgggtttggtactatctaaggtttcgggcattcactgggggtcttggaagttatcctctgcagatataggaggactactgtaagtatcggttcaatgttttaatattttctttgcagcatctcaaatcttacataggaaataaagataaaagttccttaagctgcttaatttgcatgtgttttccaaaacatacatgtattgctaatatgacaagcattgcaaataatttgctaatacagcaaacattagcaaatcctaactctcatactccccttcttttctaaaatgttttttatgtgaaacccaattccaactatttccttgattttcctttttaaaaaaggactcgagatacttatacttaaagcagaagcaaacccaagcctctgtcagctagtagaaaaataagctgtcctcaagtcctacaaattttcctaaattatagccacacagagcatttgctgtataaatacgtacactgtgttccaaacacactcttacctaagatcccttagactacacttcaaatgcctacgcccattagggtccccccacatggacaaacctcctctgcacacagtgaaataatgctaacccctcttacagaatgttttctggtatttatcagtgtgcctcacatcgctattaagtttgtatctgtactgcctgcctggtgaaaagaagctttcctcaagggcagaaaacataacgtggcatgttatagcctccccgtggagccccacatccatcatctttggctttcagactatcaggaggctgctgacccccaactccttttatgtggtgctcccaccctcagctctctgaaggaggactcattagtgactgtatttcaaactctgcagcaccatcccctatagcttattagagcccaagaaaaccaaactgtacgtagcattctttccctcaagggctttcacgaacacacaaaggctgtcgttagataaggaagaaacttgactggaggtgagcataagtctgagccacaggtggcatgtcaacacccatgggtgcatggtggcttgcgcctatagtcccagctactcgggaggctgaggtgggaggacagcttaagcgaggaggtcgaggctgcagtgaactgggatcacgtcactgcactccagtctgggcaacagagtgagaccccgcctcaaaaaaacaaaaaacaaaaacagaacgtaacaaaaaaacaaagaaaagcccccaaaaaaccatgggtggactcaaactaggcatctggaagaagcagttagtccaggaaaggaaaacagggaatactcagagagacaagggaagatgagaaacagacaagactggatctggcagagaccggatctgacagggcctgcctgtgccctctaactcttttaagtcttgggatgtgcatttggattctaggagatgccttgtccccttcaataagccctatttctaaacataagctcctttagtagctttatgctccttccaattgaacaaaagccaagaaaaaggcccggcttgcatgctagttcactaattcccaccacatgatgccctcaatctctgtgcgcagaccattctgtcctaccactgcatcctccacttgccttgatcactttatctgatccctgaccacttgctacctcctattctgctgatgggctgtctgtcctattagaatatataatccttgaaggcagggacaatatgattcatctggtgttccctcaacagtggcaaaccctgggatagcacagtaagtgtctgataagcatgtaattaatatttctggttaaggtcagaatccattcaatcagggactttcagtatacattaagttccctttgggtattataaacctatctcttaaataagatattctaaatagttgttggattatgggcttttgagggaaagtaagtatctcaatgcctttcaatattgttcttccaagtagatatggacagcttatacaaatcatagcatctgctataagcagtagattactgtaaataagcactcagctgaggaaggcatttaggaagagtgacaagttaagctctcacttgggctaatggggcccattcagttagtacaggagtctgaaaagcagcctacctacctggtcatacagccatgttttatcattgaaagtgaatgtatcagtacatgaaataattttaagagtgcataggccgggcgcggtggctcaggcctgtaatcccagcactttgggaggccaagacgggtggatcacaaggtcagtagatcgagaccatcctggctaacatggtgaaaccccgtctctactaaaaaatacaaaaattagccgggcatggtggcaggcgcctgtagtctcagctacttgggaggctgaggcaggagaatggcgtgaacctgggaggcggagcttgcagtgagccgagatcgcgccactgcactccagcctgcgaggcagagccagactctgtctcagaaaaaaaaaaaaaaaaaaaaaaagagtgcataagaaattccaaatcctaacaaccaggaaagagggggaatagaaacaatcttagatcatattatattaatatttttatatataataattattattaatattaaaagcttatcatcggtagcctaagtagttttgtctactgaagaaataccttaaaacctggtcaccatcagaatgttttgttccacattttaaaaatctgaagtctctcttctcactatctctccaagttggaaatatattgatctcagacaagatgacatttaagttgctaaatacgtaaagcaagaaaagacattgatgatatttaagaaagccaagaagagaaatgtatatattaaaaaaaaactttgtaaagccatatgttgtcagagtcctacagaaactttgtctctattcccaacattaagggcaaatggagaaccgaaaagtcccttttgtaaacaggccacctaagacaggtgattaatgccaaaagtcctaaaatgaccaaaggtatttcaaaaacacaaaatcaaacatggctaacaaaaggctgaaaacaaagttaatgaacagagtaaatggaattggaaattgctactaattctgaaaacagtttgcctacttttctacttagtcattcaatttttaaaattcacctttagccaaattcttatttctttttgaaaacgctaaaaattatgtggtactaataaaatgttttaaatatattaacaaaacgtcaatgagtaacatgtgatgctttagcacatcttaatttacaggtcactgaaagagatgagctgaaacccgcatgtgttttgccaggattgctggagaacctgaatagttaagggaaaaaacctgcattccagactgactcaggaacaagactgactagatttgatcattactgcaattcagtgacagatagatgggagggttcattttactattctttctacttgtacatatgcttgtaattttgcatttaaagcactgaaaatttaaataaatacatttagtccagaggaaacagccaggtttctaaatttataactgcatgtgaaaaaggaaaaaaaaaaaaacccagatccaaattgtgtctgcatgactgcagctagcatatatgaatatatacatgaaacagagaatcaaatgctctataccaaattgtttcagagatagcctatcttgtatattttcatcgtctcaaagcttttccataccagtccctttttcaaagaacatatccaagaagaaagtaagaaaaatgtcataactgagggtttcctaagtaccagacatcactgcaaatgttttatgtgtagcacatcataatcctgagttagtaattactccaatttatttaagatgaaactagaacaactaaaatcgatgccatttctaagcattcaaagagtatattaatcataaattttaaactactcggacttaggcatataaaccaagacaaagcatgtcctagacaatatatacttctgtttctggatttcaatgacattctttaaattttcctggaatacaaagaaatatcacatcttaaactattctcaacaaaaattcttttaataatgaggaatactgaaaatacaatctctaacttaattgagaaagagaactggaaaacgaaaacgttctctgcttgcaacttaatgaggcgctgagaggcagcgtgcagctgatgaaacgctactgcaataatgggaggtatcagcatgctatgtttccaaatgatggccttatgtaaaagcaaaggcggtaaaatgctgcagggcgttagaatatttcccaataatctggccaaactctgcttctgacattctatataaatatattgttatatccacactttcatactcagagttggaaaatcctgtcaaagaaccttgtttgatagataagctattctaatttcaaagtgttgaatgaaaaacaaattgtgggtgggagggaagagatgggagagaaataaaaataaataggacaggacacaattgtgaaaacacaagcagatgtgtacacatagcctagattttcctattctctctttcaatgtagggctaattttcttattttaaaatatccaaactgccttcaactttttaaccctagaagaaatctacggtcagtaaagcaatccttacatttatacagaccagaaatgcataaaatatatccacatatagacagcctgatccctccattcaaaaactgtctcactcaatatgaatttgagatctttcaaattccaaaaccacaatgtatacgtgcctatgatttgccaattttcagcctacaagggtgaagggtgcccatagcaaagtaataatggtcaagaatgtaccagaccttctaccataggataatgtatatagtataccttccaactcggtaagattaaaaagactacctctgttgtttgctttttatttaattttaatttcatacaactgtagaatggaaaaagaaaggttgagaaacaattcgtgtctgggaatcccatgttcagttatgtattttagaggagaaagttgggcaaaggaaatggttttgctcaactcatctaacaggcagtttctgctttgtgcaggcactgctgtgctttgtttgctgatcctgttaatctatagattaagcaactgttcatttaaagccagaaggttaaaaaggcagagaacagataatgttaaatggtgggaaagaaaacaggaaaaagagaaaatacccataaaccaataaaagagatgataaagccacgttcacctaactttcccaattggaaatctctgcctgcatttgaggcttaacctgttcaaagttccctccagagacctgccctgcagtgtaagttaccagagacatcaacaccttcaagaagcccctagaccctagcccctagctccaagaagtgcactgcatgttattaaaagaatagagaggctggaagagcctgtttcaagttatctctttttttttcctttttttttttttttttttttttgggatggagtctcactctgtcgccaggctggagtgcagtggcgtgatctcggcccactgcaacctcggcctccgagttcaagcaattctcctgcctcagtctcccgagtagctgggactacaggcgtgcgccaccatgcccatctaatttttgtatttttagtagagacggggtttcaccatgttggctaggatggtcttgatctcttgatctcgtcaccagcccgactcggcctcccaatgtgctgggattacaggtgtgagccatggcacccggcccaagttctctctttaaaagaggaagaatagtatggggactcatccaatttcttgtttaactgacaatatgtaactcttacaacacttgcctgtgtgtttctatcataaagtgaggatatggtttaagactgtgaggatacagtctaagactgaacaggcagccttcctggactgctcgggtgacaaagagcaatgatgcccttaatacagcacctcaggatatcatgaatgaggggatggacaggatgatctcccacaatgcttttcacactattattttgtaatttgaattccttctctccccaatctaatctactcttggaaacaagctaatttttctaaaagtgtcttgaccagaaagcattcatgctaaaaatctgccatagcttccacctatctccagaataagaccctccaatttgcaacctcattctacctttgcaattttctaaattttcttcacaatttaattgtattaatagatttataaggtccttatgggccaagaatggtatcccgccactcagcaacacctgacacaaaaacctaacagtgcccaataaatatagactaaatttgcctgtattaaatttgggaagaaatagattcttgagatgtagaattgaagtacacttcctttattcttctggaatcccaaagcctttggtttaagtaaaactatgtggttttttttttttttttttttttggagccggagtctcgctcttgtcgcccaggctggagtgcagcggcgcgatctcggctcaccgcaagctccacctcccgggttcacgccattctcctgcctcagcctcccaagtagctgggactacaggtgcccaccaccacgcccggcaaatatttttgtatttttagtagagacagggtttcaccgtgttagccgggatggtctcgatctcctgacctcgtgatctgcccgcctcggcctcccaaagtgctgggattacaggcgtgagccactgcgcccggccaaaactatggtttttaaaaaatttcatttcatcccaaagaaacaggacaataaaatctaacaattctaacttttagcccctggttttagaatatgtttcaaggggaatattatttttgttttgttctatttatatttataaattcctcaggccaaaattttggtactataatagtttattaaagcaagtggccactttatgctgttaaatgatgaataactgccaggcacagtggttcgcacctgtaatcccagcactttgggaggccaagacaggtggatcacttgaggtcaggagttcgagaccagcctggccaacatggtgaaaccccatctctagtaaaaatacaaaaattatctgagaatggtgtgggcacctgtaatctcagctacttgggaggctgaggcacgagaatcacttgagcccaggatgcaaagaatgcagtgagccaagactgcaccactgcactccagcctggttgatggagtgggactctgtctcaaaaaaaaaaaaaaaaaaaaaaaaaagatgaataattgacgtagttgtattcgagttgtttccataatgctatgagagatactttttgcttctagtataaataacagaggaaaagcactgttttctatcaaagaatgtcaaaagaaaataacaactcaacagtctactgtggtcatctatgattcacacaaactaccctaaacactaaacaaaaagaacaatataaggattttgcatgcttaatgtgtttggaagcatactttgtaatattacaaccaaatattttaagtcatactatggatttatgactttactattgaattatcatggcctttgcatttgaagcggataaaaacaaactgaaggcaaatctggactacacgccaacattccaccaactcttgcctaaacatgtctttagaattctgtcgatggaaggctgggtgcagtggctcatgcctgtaatcccagcactttgggaggccgaggcaggtaaatcactagagttcaagaccagcctagccaacatggtgaaaccccatctctaccaaaatacaaaaattagccacatgtggtggcgtgcaccttgtaatcccagctactcaggaggctgaggcatgagaatcacttgaacccaggaggcagaggttgcagtgggttgacatcatgccactgcactccagcctgggcgatggagtgagatcccgtcaaaaaaaagaaaaagaaaaaaaagaattctatcaatggatagaaatggtctctgcaaaaggaaagtataggctccattttatgggaagctctctcagcataagctggatacagaactcctgcccattaccgctccaatctctgtgccagaaactaccatccacaagcatttacctaacgacgactagcgtgctctaggtcagagctaagtgttggataaaatccactgtaaggcatgatccctagaaatgttaattctcacaacactttgggtctgtagggcttttgcctacagaagccacagtaggtctttgtcttagctcaaaatgctgccttactgtgaatggcttaaacaacaaaaatgtcttttgtcacagctctggaagctggaagtccaaaaccaaggtgccagcatgaccgagttctggtgaggccgctcttccttgcttgcagacagccacctccttgctgtgtccttatgtgacttcttcgtttgagcagggagaaaaaggcaagctctttggtatcttttcttataagggcactagttccatcacgggggcacatactcatgacctcatctaacagttatcacctcccaaaggtatcatctccgaataccatctccgaatagcctggggttagggtttcaatatctaaattttgggggaacacaaacattcatcccataacagtcctcaatacatacttgaaaaaaaaggggggaaaaatctcaaatggtgctaacacaaaatattttttaaatgcattgaaaggcaggtatttgaccaatgactaggcagaagcaaaactattacgattgggaaagaggaaagaatacataagcacaaagaatttggaagacttgggattaaacaaagactcaatttaaaccataagatccaagttatcttctcaatcaaactttacaagggtttataaccaagagcaaaaataaaagactgtgtttttactttttctcttgaaccttgcccttgaccaaaacctggttcaaagaatcaagggcaaaaaaaacactatgaatgataacaacaaaacaacccagtaacacaaaatacaaattcagagaagcatgagactatgaaaggagcagagtagataattcacagtcaaagttatgtatttatcatcatgttaagctatgcaccaacatgtatactgcaaagcaatcctttggaaaaacaaattaaacaatgagttaaacttgtgagcaaaaagtcaaaacgacgtgacggtgatgagttctgttggttttgttctatcctaggaccagactgttaacagccacctcagacttagccagctagttatctctaaaatattttggtcatgagagacacaaagtgagaacgcaaagtaaaaaattcatccaccactattgggagaaaaaaaaaatcattaaatgagtagctctgtcaatggtaactaatggtttccacgcatttttttcaaaaaaaaaaaaaaaaaaaaagaagaagaatttgcccaatgacagataccagaataccgtgaattttcatggtgctgaatcaaacacccatcaaccaggaattctatacctaatgaagcaattgttcaataataagaaaaacattgttcaacaataagaatgattaagatgaaagtcatccaacaaaacggaatcaaaatattaatgtaatacagggtttgagatgatctgatgaaaagactagctgtaaacaatgagtccagttaaagacagaccctatgaatgagaagtatggcaacagaggagatggtaagattataactttgaaaatataaaaataatacaacttataaaacctgtgagaaggaaacgtggtaacattgtgagagtattcttttccttgccgttcctagcaatgaatccatcaatacggtttaaaaaataaaaacatgaagttaaaaaaaaaaggcaaaacgaacactttccaacacacgcatgaaaatccaagcctacaaatgagaactattcattatttctaattataaaagaaaaacaccagaatagctacaatgtggaaagtggcaggaagatcctgaaatatctataaagaatgttctagagaattcaagatgcacaatttgaaagaaaatgtcaacactgtctaaaacttctgagtgaacttgtctcccctgccacctgctcaatactccccaaaaagccacttaaaatcctaatgcatgatgcactccctcacctcgccctgtccagcctacaagccttttctaatccatacccactgtgttgcagcactggggtcattcttctattttgcccatgccattcctcatccctcttctggcaacagctcctctccccacatcacacggccacacccacaaggccaagatgggctagtcctgatactgagtccctgcagatacggtggtggctccaagggcagacgtgtaactcaaagcagtgccaaccagaagcactccctgataatgcccatgggcagaacaaagttgggatgccaaaccaggactaacactaccagaggtcgtggctaccaacatccctggtctccttgaggacacccatcttagcaggagaaaaggagtaaacacacagcaggaaggtaagcagaaacaaaagagaccctaatggggaaattctaggcagtactgaccctcggttccagcacctagggatctcatttctgtgtacatttttaagaaattgggtaagcatcccccacactacgatccttcccatcagtgggagaaaatattctccatatataaaatacaaattgtttagggggtttttatcacctggcaaaagaaactgcctaattaacccaccctatctccccattcttcctcagaaaaggagatgttccctcccctttccaagacccaggcaatcacatatccactggatctcctttctgcctagttcttacagaactgaataccatagtcatagcttactgtaaccttgtactcttgggcccaagcgatcctctcactcaaagcgctgcgactacaggtctgagccacggagctcggccaaaacctagttcttaagagatacctgcaactagtgcttaggatgggtatcagtccttcccacagtttagtttaagcttccttaggcccaaattccttccatttaaaaatcaaaatcacaaagcctttccttttgtcttcaatgacctcaaagctttttgcctctaggtctttcctccaggagtccacagctgactcaccattgacccacgttgtttttcctgcaatggactacaacgtaacttctccccatgctattccacagggtcaacaatgaccttctatttgccagatcctaacaatgttttgtcacacacacatacaaatgtccaaaaacaagatatgagcaaaagagattgctgggtgtcctagcattgaaatgcaggtgttgtcttgcagaccctgagggtggcggggaaaggattatctgattctacagcatgttcctccagttgacttgctactaaataagctattttacgacttacacccttaaaattcttacacccttattacttacatccttacaagctattccacacccttagagctttgtaaagatggatactgcagacaccccatagcaatgcaagtgttcctgtaccatggaaataatttgacgatattccagataattccagatgattcctgttcatagccatgcaactcaagtgtgctggggaaggaattttaaatctctccaagtcaaaatgaaccatttttcacatcttacagttcatctcattaatgaattgaataaaatatttgacatgtgttcagtctgcatgacagacatgattttaccatgtcaaaaactacacttcaactgctttccgtttgcatcatgcttgcactcttatctttcccctcatttagaaatttacatggcttgccttccagcatgtaacgcctcctacttcctatcctatctctctggccactgctcatctccctcatggggaatcgtctctctttgtttgccttcaatgctgcaattccccaaggtgctttcttcggttcttctccacaggtgtcactgagtgggtaaaatgagtgcaagtacttagcatagtagctgaccctttgtgaccctttgtgaatgctcaatgctgatggtattagtgtcactgtcaccatgtagtttttagattgctaaaattatgattttacaagcttttctccccctttgaagaacaggccctgtgttctgttcatcaatgcacccttagtatccaaagacattatgtctgaggaggaagagagcaccacagggttctagaaaggcatataatcatcttacatccaaatgtatttaatgaaagatgtatttaaaaggaccccaaacaagccttgttccctgacttgcaacatgcagtgaagttctggttgaaggtatggagggactcatttctacctccctctcccacttgccagatcatgggatctaagacccttacagctcagagtcactggtggctcgggatagcacagagaacagcactgttccacggaaacagaatgcaactgcctatggaacctcaatttcctcactgccacgtgaaacgtcaaaagaaacaagtgaaatcaattttaatcacatagttacaactcagtaacatttatgatgtatttaacaacatattcaaaacataactatttcaatgttaaacctatataaaaatgaatgtgatcattttacaggttttctcacattatatctttgagatacggtatctatcttacacttatagcacacatcagtttccactagccacatttcaagtgccaaacaaccacatagggccagtggctacagtactggacagcacacggctagaggctgcagcatggcagtctctgggagaacgaagatatatggtaggggacatagtgataaagcaagaaggtgatttgtttaaatgcaaatctacaatcactcctcttctctgaaaaaataaagtctaggccgggtgcgggtggctcacgcctgtaatcccagcactctgggaggccgaagagggtggatcgcaaggtcaggagttcgagaccagcctggccaacatggtgaaaccctgtctctactaaaaataaaaaaaatcccggcgtggtggcaggcgcctataatcccagctactcgggaggctgaggcaggagaatcatttgaacccaggaggcagaggttgcagtgagctgagattgtgccactgcactgcagcctgggccacaagagcaagactctgtctcaaaaacaaaagaaaaaaaaagaaaaaaataaatagataaaaaataaagtctagtgacttcctgttgctacaaaataaagcccaaatccattaaaatggctcacaaggtatgatgttttggccctttcttacttatggcgcctaatgttgaagaatctggctggtgtgtatcatccaacaagacttccgtgggtgggtggtaggcagaggacagataataccagaattgcaagaggaaggtgacagcaaagggctaattctccccactcatggtggccaccaacaatctggtaaagtccagaactgggaagaaccactctgtgctcaaccctttgatacagtttggctctgtgtccctacccaaatctcatgtcgaattgtaattcccagtgttggaagtggggtctggtgggaagggattggatcatgggggtggtttcaatgtttaagcaccatccctcgagtgctgtcccgtgacagtgttctcatgagatccgggtgtttgaaagtgtgtagcacctctcccttcacactctttctctttcttgctctggccatgtgaacatgtgtcttcttccccttcacctcctgccatgattctaagtttcctgaggcctccccagccatgcttcccatacagcctttggaaccgtgaaccacttaaacctcttttctttataaattacccagtctcaggtagtttattacagcaatgtgagaacagactaatacaccctgggacaaacaacaggctaagacagaaagtaaagctacccaggcattagtaggatctctaagtgaaacgggaaaagaggggtgttcctggggtcaagaagagtaatttttggtatggccaccatacaaatgtgaaaacatctggttattcatacgtgaaactaagggaagaaaaacttagatgcaaactatgacacatgtatcaaaatagtcgattcaccagaaaaggacaatttggtcaatgtcataaactaaattttaattctagcctttaaaaaaagtttatttgacactcagaatacatagtctgtatgcatatatcaaaaaaatggtatcaaaaacatataagtatgcacagagttctgatttataaaatttataacttatctacacaattgtactacaagaactcttcagcagaatgtaaatattatttctaacattgacactttataaaagtcacacccaggcaaaagctgatttattatcaatccatacttagtaaatcagcacacagaatgttcttgtaaaaatacatataatggaccatacgtggtagctcacggctataatcccagcactttgggaggctgacatgggtggatcacaatgtcagtagttcaagaccagcctggccaatatggtgaaaccctgtctctactaaaaatacaaaaaaatttagctgggcgtggtggcgggtgcctatagtcccatctactcaggaggctgaggcaggagaatcatttatacccgggaggtggaggttgcagtaagctgagattgcaccactgcactccatcctgggcgacagagcaagatgtcatctcaaaaaaaaacaaaacaaaacaaaaaatacatataatgaacttaagtattagtgatttccactattcatcatttcacatcatggttcatactcctttcaagataaaaattacttaatatgtaatatattgtgataatgtagatgctttttgcttctcaaaacaccaattagtaattagagcttgtcctttcttaaacagagcgctatcaaaacaaattaaaccttttaataataataattttagtatttacaatttaaaataaaaggatctcaatagaatagtaatattaattaaacaacaaacattcattatccaagtaggctaaagaaaaatttctagtacaaaaaggattacaacaaaagaaaatgttgccaggctatctgctgtttataatgagtgtcgagaattctgctttgccaacaagcataagactaattacttctaatgttcttaagatgcagtcacaatgcagagataactatctaagaagtgtgagataaaatgcctggaactccagctattttaaattgaataagaaaggagcaccctgtatagtaacagcaaaaagactacaaagaattaaacaaaaatgaagatctccacgaaatgacaaaggatgatttccaggatacaaagttaagttaaaaaaaaaaaaaaaaaaaaaagcaaagtgcagaacagtgaactttgtactttttttgtacaagaaggaaaaatatgtattttcttttgccaaaaaaataaatcaggaacaatgaaaatgtttatcaatagagaatgagtgaaaagtgagctttctgagtatatttcatagaactaacatgatagtcaaaaagtaaaattaataagggaggaaaaaaccaaactataatagaatacaaacagatacaaatgaactaaaatatgtatcaagctggtaacagaaaaaaattaatgctagcacttttaaccaaaagaccttgactgtagagccgtggtgagatatatactgaagatgaaaggagtgtggagggctgagcatggtggctcatacccgtaatctcagcactttgggaggtccagccagaggatcgcttgagcccaggagtttcagacagcctggccaacacaaggagaccccatctctactaaaaattaaaaaaaatcagtcaggcctggtggcatgtgcctatagtccagctacttgggaggctgaggtgggaggattgcttgagcccagtaggtcaaggctacagtaagccataatcttgccactgcactccaacctgggtgacagagtgaggaaaaaaaaaagtgctgtgacatcttaaactactgtttagtgatggtcataatacgacatcataattttaaaaacatttatatgtatatcatagggtaatgcaaataaatatattaatggtatggtgaatcattaggaaccaagatttttactgtagggttaaaatactgatgcaaaatacaagaagttaaattttttgaaaacaaatgcatgtgatccaacgtgaattgctagccaccggacaggacttacttcttggcaatactgcaggatgccttccttggtatcaatgcaggttttggtccctgatggatctgaatcccacttcccattctggacattcatgtgcatgttcagtctgccacagaacatggcaatctggggttcagccagcaggccagcattaccatcagtgggtacctgaaagaagaagcttcagttagttatagtatccatagctccaaggcagaggcttggaggaagaacagggataactatcaaaaagagttctattcttgctcattctcaattaggaatcagcccggtcttcaacactcctttagattaagtgttatgtatgctacagatgttcttagccacctataaggcaatgctttcttttatactaaaacagagaaggaaattaccaataccgaaaggaatttattcatgaaaaatttacacgttttcccatatgagattttgtggtacctgctgaaaggttctgacaacaaaattacacgttttcctataataaatataatcactgtggaggctaccgcattcttataataaactccactgactcacacagagcatgatgcctgccaggccctgcctgatgaccaagactgaaaataatatttgtgccacctctcagcactgagagcaagtatggcgttggtagttagcaagtgactgtattatgattttgaacagaaaaattcactgtagaattcaccatccacaaatataactgagtatgttggcgatccctcctggtttcccccagaatattctctggttatcagtctcaactcttaacaagtctgttaagagtgctggtgtctcctctcccaaccatctgcaaggagccaacattttctcatttggagctctacatagtgcctgctgggtagtaagtaaggggtcctagctattaccattgcaggcaatagaccacttcacaaaataacttcatgaaaaagggtgccttctgtattttcaaactcttctgtgtacaggcattacctttacaaaaatatttttaaaagagaaaatggaagtcctgaaatatctataccgtgtcacttaacaggttctggtatctcaaaaagaaaaaaaaattcagcaagaaatgaaaaatatatccacaggagtaaaggtgttattaaaccaatcaattagaaggcatattaatcatgataggccctcccttgtcaaatccagctgctggggaaatgtgagacacccatgccaagaagaattaacttccagcagaagccattcgttcacacactcaagaactgggtgattccacgataacttgtatcattcctaaaaactgtccacaggaggaaaaacaccaactaaaattgcactgagaaattttcagttaaagaaatgaaacagtttccaaacatttcttcccacataaatgtaaaataagatacctctggccattttagtcatttttacacatacttcgtcaaaacccaacagaggacttaggtccttacaacaaaaaaacaaaacaggtcttagattgaaccaagtcatgagtgcaaaagctgctggcaaaatctctagagccatgttttcaagtaacttttccaatatttaacgaaattctgcctttacattgccagatggttaagtcaaagcagccgatgccaaaatatccagatcatctgcagaaatagctagaacccctcaactccatctgagccccttgccacttcctgtgacttccatgaaactggggggtctcattctctgacagatgcaaagcagcaggctaagtagaatgctctataaatttaaatttcacagctttcctgagggattaagaggaaattcattgtcttgatcttagaaatcgaaatgcaaatgttgtcaatcttactgaaataagtagtatagataataacactgcaaaaacattaaagaaagtcaaataataatcagatacctgtggataaggccctacatcagatgctatggagggccctgcccgtaaggaatgtacaatccactaatggaatcgccattgttcccacagtactttattctgttcaccttccgaattcattcctgtcccaaagatttccagtcttggcagcatgttgttaactgtacggagacactaatgagcctttaccatagctggtaaatattctgttgaaacagtctcctcctctgcctcaaactctctctgtacttttgtttatccacaatctgttcattacaatgtctaaggaaagcgttctaccttcttgtcaatacaaatgcacttgattccatttcctccccgcaaggagaggaaattgacaatttctctccccagggtagccagcctccaagaaggcccccaatagtccctgcctcctgctattcatggaccctgggaaactccacaatgtatcagggtctgtctgtgcaacaaatggagtacagcagaagtgatgatggtgtaacttccgagcatgtatatattagacttaaagatgctgcaactcttttaaaaacaaaccctttgctaccagaaaggtcactgaagggcatgatgatgtgtaacatccaaaacaaggtcatgaagggcatcacaattcttcattgctctctgggatcactcactgtgagggaggtcatcagctgccatgttctgagacatttggtgctaaaaccaggaaagtttttggcaaaatacactggatcaccctacctgacaaaccaagtaaatgcttcatttttttttcctcttttgacttaacttcctttgatttcttctatttttcactttgtcatcctccctgcttcttgactttacagctattttaatgtcatctgttggcatatgtgtgtatgctgactatcaaaaagtggtaattttttaaacatttttttcaaataaatttattatgaccctataattgtctcatgttcttgccattttttaatgccatctgttggcatatgtgtgtatgttgactaccaaaaagtggtaatttttaaaacatttttttcaaataacttgattacggcgctataactgtctcatgttgtcttcattttaacaatgagagtttagactagaaaatatatgcttcagttcctgtcaggttttccaccagatgagatttaatattaactttaaaaataaatgtttggagaatcgtgatgattaacatgctctattttcttcaagtggagatcatttaataatttaaactgcgaatcctcaataatagggtaagctgttgaattagaaattgtaaaattggttgtgtgtatagatcttcttacatttgacattacaagaggcccttcacaaataaatatcaactcacaaaagccatgtttctcaagtaaaattttttccccccgaaccaacaccagatgtgtatatggaaatcagagcaattagcttggagatacaaattgaaccagaaaccttcctattcttactgaagcccatctgcaaacaattccatgctttcactacatatgcctgtctccctgaattaaaacaagacaaacaactcacggcatcctcacctgcatcaaataacccatttatgaaacaaagcctggttgctaagcgcagccactccctggcattcagccagaaggaaatgtggccacattaaacattgccatccaagggttaactcccttttcctgagtgaagcctccaagaaatgacttaataaatgatacacagggtcctattcaggatctgttaatatggacactcttaaaattgaaatcttttaagattcaatttacctgccaaatacctgaaatctggcaggtatttgctgccagtaaaaaagcacagtcttacaaagtcatcctaaagataattattcctaattttttaaacatttttattttctaaaagaaaagaaatataaataccttagtagatgggaaatataaccacttaactactacattttagttctatttatgtcttaacactattctaaggtgagttaagattactttgcaaaaatctaagacaacatttaaaagatgagaactgtgatataactggccgtttgtggtctatgcttttctaagactgaatatgaaggtaattcttgtaaactgaatgacttgccactgacatcataaaactggagatgctttcccatgggaaaacagtgttcctgacaatgaacaaaataaccagctaaaaacaatgaagcattcataaattgcctcaaaagcaagaggctgtttaccaagtgctctgaactacagagacgtacatatcaaacttaaaaatgctacaagtcttaaaaacagaaagaaaatatttttgttaccagaaaaaaaatatttttgagccacaatataaagaatactgaagtgaaatggactttccaaagcaatttttagaaatggctttaaaagaggcttaaggggataacataaacgaatataaacatatatacctaatctggaccagtctgcagatgtgaatctggaaaccctacgcctacagttgctacaattttcaattaaatgcaaagccaccttcttgaacaagttctcttgttgtcctttcaaacagggtgttccctttctccaaaaagtttctctctgttatcatctaggagatcaaaattccttatagagcaggcttggcagcattcctccccaacagggtctcaactaggagggaaaagtgaacaaggagctctctgttttgctagctgagaggtcctgtttggcaaggagagggcacagatccatagcttagttgcatccgtggatttatgtaattttaaggtttctggctaatgaaagccatctgttttctgcatttgaaccacccgctgactagtctaaatagctggcctcatataatgaagtatttggtactttttaatcagttcaaacttcttcgagtcagattcttgcataatctcagtatttttttttggatacactgtcacactccaccacccagactagagtgcagtggcatgatctcggctcactgcaacctctccgcctcctaggttcaagctattctcctgcctcagcctcccaagtagctgggactacaggcctgtgccaccacgcccagataatttttgtatttttagtagagacagggtttcaccatgttggccaggctggtctcgaactcctggcctcaagtgatcctcctgcctcggcctcccaaaatgttgggattacaggcatgagccactgtgcccagctttgtagcgatactatttctatcacatccatggtttcctgacataaatactggattcccttaacctgggcataattcaactataccccacaagagtgctttacattttcatattaaaacatttaaattctccattgtcaaatgtaaagaactattttctagaatcataatctagaaaatctgagtgaacccctttcaggggaataattcatctgtagggttttcttttaaatgccaaaaaagtatttccagtgtaagcggaacatctgcagttgctcatttcatcactaacagagaactgaaattaaaatcagaatcacaaaagtggaccataagagggaggaaagggcaccaggtaaggatatgtccaaggccatggggttatagggacagagaagggaattcaacctattccgtcaagggttctgttaatgtgaccgggctgtctctcaaattaaaatggaaaattgcaattttccaaggctttgcccctgtgtgtgtgtgtgcatgtatttgtggtgagcaaaaatagagaagctattaaaaaagaaaaataaaatgtgatgactgaaactgcaagtggtttctatttacccttgtggagagttgccacatctattcacagccactatttgctacacaattatttcagagcttgagtttcggcttaaaaaatgatttgccatgaaagcgaataggagaaaaacaattcctttcagaggagtaatctacatatttcactcctggaaacctgaaattctttttgggtcactgttgatctggcttctaattacaagctatcctcccttgatgtttttcacggcctctgttgatattagattggtgcaaaaatcgcaattacttttgtgccaacctaataccaagcttttttactactcaaaggatagatgttctcaagttgacccaaaactcctacccactcataagaaggccagtaagtcatgcttgctgctggtgcccagtaggaaatcaagaggtccctcaataggagtctttgttattcactactcgtgaaattaataaccaacatttgaagcatgcatttaggcaggacccagtaagagtggcatctactgctaggactgatataaatgaatataaaagtggaattacaaaaaatagagccttatgcatggcaaacaaactcttagcctcaaaaacagtttacaatctagtcaatgtccatttagtcttaaaaggtgaatgttttcttttaacttcatatatatacatacacacacactaacatatatgaaaccatacacatactatatagtatgtgatgaaatgagcgagatgtaaaaagttcatctctttcattctgtctttacagtttttctgtgtgtcttttgttttgtttcgttttctgagacagagtcttgctcagtcgcccaggctggagtgcagcggggtgatctcggctcaccgcaacctctgcctcctgggttcaagcgattcttgtgctttaacctcctgagtagctgggactacaggcgtgcaccactacgcctggctaatttttgtattttttagtagagacgggtttttgccatgttgccactcctgacctcaagtgatctgcccgcctcggcctcccaaagtgctgggattatacgcatgagccacaacgcctggcctgtctttaaagttttactgacatgtctcatacagtcaccaaagggaaaaaaaaatgaaaaaaaaatatatatatagtatttgagatctttatcctattctgactctctcaatattgccatatctcatcagccttgaccttgtgaacatgcagatagaaaaagggttagaggcaaaaatcaaagacctactaaggcctttgctcattatctcatttgactcagaaaaaccaagataagtcacttccacatctatttagataatcagaagggctcaaaacccgcctagagtctactcaagagtgttattccaaagcacatgcttgctttttgacagaacaagccagctggcattcctggtactagatgtcaagcttttttaattcttcaatcttgaatattattttcaagtaatttttcccccatggcagtactattttgcatgtctttgttactggcttttaaaaaaattacttttagagcaagtaaaacgggaagcaaacccacagcttaaatgtctaatttgcatttctcaaatttaaatcactagatgttaatatctactaacctctggtagtttcctctttaagaaatctctcctgaaatgcaaacacaaatttctccaaagttagttctttccttaaatctaatgcagccaactgaatctgcaaagtagaagtccaaatctcccaatgttccaactactaatgtttatcaacccttactttatttaatgtgtattttctagtttttcaacagttgacatatacctacctatgtacatatacacatgtatatatacctgctatacagctacttgtatggtatgtagtgggagtgctagaatgaacacacacacacacacacacatatacacacagtttaagagctcaatttgcacaaatctcaaatgctggtactttgctaagatctcattctagaattagtgcatttaagtccatgttgctaacaaggtggaggacttggtaactgggctcctcagagagagtggtttgaatggcattcactgaaataaatttgatagtaacaaataaatgattttccagtatggcttctacttgttctgacagctaggacagattagcacccagcacagaatacaacaaagaaaaatcaaaatctattattcctcttcatttttggtacaagagatattctacatatattcaatttctaaatttctactgttttatatcaaatgtagccaagctaagccgggatcagctgacccttgagcttgtgggctataataaatggttattgttctaagccactaaattttggagtgagtttgtggctttgcagcatttttgtggcaaaagaaattaacacagtcatgtatttgataggaataactaaaatactaagtgatagaatcaaggcatagattgtttcagaaggtagaaactttctcaagttgcctttttttaggcagctgggagtacaggcccataccaccatacctggctaatttttctgtagagacaaggtctcagtatgttgccgaggctggtctcaacttcctggcctcaagtgttcctcctgccttggtctcctaaagtgctgggattacagaactggtcaccatgcctggccataaatattttatatttaatgtattatgtaaggtaggatcagttatggcttatgatctatacactttgggttgtcctagaattggaaagaatctgagcagaggcaaatagaatgatactgtaaacacatgtactgaagcttttaaggagatggtaatcaatctttgcaatctttagatctgattgattttgtgagcttcttttctcctacattttttagacctctgcaaatgataaacaatttgtacaaaggcatagtttttaaaaaaaattaaacatattttgtttacacaatatatttctaaaaggaaatatttcaaatctgaaagcaatctaatgctattaaatagaccccgttcctgctcatacctcacatgtggctatgtgaatacaaaaatcttataattatacttctcccagcaaaggacatgcaaatttcatcaccaaacattcatgctactgcaatcacactccatcaagccatatgtgttgaaatctgtgtaacaaaagcagtgagggctcttgccacacgtaggctcccgcccagccctctccgggaggtaggtatgtatgcagagaagagagtgggctgagaaatggaattctggcatgttgggtcaagcagactgatcatgtgacactcgcactgagatcctaccaaatttcaccatgtggcagagtcagcaccaaacaaatcccaaagttaaagcctcagttatcacctgggttttgctgcatagacctagccaaatatgtgtaagagttatgagctctagacataatttattttattgccctgaaatagagtatccccacataatttgcaagtttaattgcaattatattcctgggggtcactcctcatacctgcacagttaggatattgccaggttattcatggtacctcacacaacacctggcagttatacacagatcctcatcttttttttttggagacggagtctcactctgtcgcccaggctggagtgcagtagcgtgatctcagctcactgcaacctccacttccctggttcaagcgattctcctgcctcagcctcctgagtagctgggattacaggcgcgcgtcaccacacccggctaatttttgtatttttagtagagatggggtttcatcatgttggtcaggctgatctcgaactcctgacctcgtgagccaccgcgcctggccttacagatcctcatcttttatgcaatatcatattcatcactaaataacgacacagcataaaaatgaacttttactttatcagtggtactttacagcactacagtgagttttctagagtttaaggcttacgctaatatgcttaatgcacaagtaagtgcaaacttaacaggtttctttctggttcttttatttttcccctctatttcttctcattgacccactgcaatgttgacccactcggaacgtagagcatgggcaaaaaaaagaaccaagagaccattagagaagagaataagtctttgaaaagctgcaggtgggaatataatggaaaacaagattccagaagaggtagtgggtctaccatttaactagaacatgcccagtagagccatactgataaatctgcatcttagagttgctgatatacttggacaaggggaaaaagaagcatattcctctatcctttgtcagcccagaaatttatcccaaccctattttcctatacagtttctaccagctttcaggcgtcaggccattgtaaaaccaacataggtggagagggcaattcaggctaggatggggagaggtagttagcgggatttccagttctgggctatagtgagggagtcagtatacactgctgagtctggtacatacattccacattgtccataccctttaatatctttacaatttctaataccaaagtggtatgaaaatactaatgaagttaaagacccttaccaaaatgctaattttccaggttaagttatcatattgtcttcaatgtgcattaaaatctcagagcagctatcgggggataaggagagtgagtacccactaagcttggaggccagctaaactctctagaaagtcatttccatctgacttcccaccagcatgaggcagagcagttcagagcatttttcaagtgagtcggcctgccgttaccaatgccaaatttaaagcacttatatgttttatcacaagcccatgagcttgtgatttcataaaatggtactaactggtccttgccatgagtaaattcaagtaacacgtatgaagaagattttaataaaattttttattagaagattttaataaaatttttttattaaaagattttaataaaattttttattttattaaaagatttcttaaaggtcattaacgcaagtcatattagaagagatcacaggcaagtagacaaaaagaatttactccgtgaaagctcactgaaacaggaattcggatatttgacatttacttttgttcttgtctctcatatgtacacatcaaagcacacacattcacatggatgtaaagatagtaagaggccacctgcaatcagaacaagtgagattataaataagtatattatataagaatccaagacaagaattccttacttttaaggaaagggcatcagagatttatgatcttagacctttacctttctatttttagcagatttacagaaatattgcaggaacagaacatgaagtcacttatttttgataagcacaaaggatatttacattatatcgtctggtttatttcctttcaaagtgtcataacatttactcatcagcctttactgtgtgcttataactctcatactgttgtggttttattactaggatttttggtctaggagaaagctgctttacaaacataatagaaattcagtgagaatattaacttgacataaaaacccaagataattttcaaacagcattcttgttcattgttcaaattgtattctgttaacttatttagtttaagccaagattacttcttttcctgcagacttggaacactaaagaatactccaggtttaaattccaggttatttgcttgataagcctgggtagattgtccttcttaaataacttacaccaaagcactatcaaagaagctctccctttgtagagccctcagattcacagaaggaatttttcgaattgccatttctataggaataaaggctatcaggaaccacaatactaggagaaaataattctgaaggggaggtagcagtgaagactcttatttctattttcttgactatatttataaaaaattgttgccgaaagaacagaagaccaagagccaaaaatcacactgcagtcttactcttggatgtaatgttactatcagtttcagtgacacaacatcagaggcaatctgatattgacaatggtaaaaatatgcagacgccaatattaggagggtgcagttagttgacagtagagcctataagtattcatctaagttttctctgtttgaagagaagaaaagagaacatcaaacatttctagtatatagagcaaggattcctaatctttttttttttttaatgtgcaaacaagacaaaagttacttcactgtctaggggttattccctactctttagcactggcctgactctctcactcccacatataagcattcaataaatacttatgccaacaattaagaaacacctggcatgaaaaataataacagtaataaactagaaggtagaaaatgtaattattgacaaaggtgtggaacaatacaaaataaattccactttagatacctgtgaaattttttattgtggcaccaggagagtaatttcctaacagagaaaagaaaacatagcatccacacctctgtctttaccaattcctaaataccagctacagttcaacttgtccacggacttcaggctcctcctagaaaacaagaaggcttaaaaagcaagacaacctattagctatgttgctcaataaatttcaatgttaatttcctaattctttgataacacattcctgaactcctttgtaattcaggcaacattttaaaaatcagatgatctaactggactccaagaattacataaacagtgtgagcagtgagacttcgaatgtgcaatcaactatttttttaatcctgctgctaaaagccttcagtagcacagaactggttgtcagagatttcagtgtaacctaacacctaacgtgaatgactgctgtacaaaaatacagctgaaaatactatgaggaagagatagaaacggattgttgatggctaagcaaaacagcaaatgctgatggttatcaaacacatgccgttcccactctacacagataagatttcaaagctgtttgagtcctaggttaagttttgggcaagttctggcttgatgccttatattcagataaacattttccaggcagtgaacatattcaaagttggggacagtggggtaacccgaaaacattcctgaccttgatggacagataatccaatggtggagacacaaataaggccaaattggctaaccaaaggtgctggagtgttaatgcagaggtctggcaagggtacaccgaagagctctcaggaaagagtgactggtttgacttggagaaggagaaggaaggcagaccaaagatcagagcagaaaacatgcccaggctgagtatgggtcggacaggaagcatgaaaggtagcacaaggctagcgtccaaatgaccttgaatttgtaataaacgtgtgaagtcactgggagctgctgccacattccaaagcaagcaagagcagcatcccaccagtgtatgaggaggatgcgggggccccaggacaactttcgtgggcctctttctctcttaaaaaaacattaaaagctatattttagggctctgttgattggtataaagacaactctaagtcaggctggattcattattgtatattcatgattattatcttgttctttatttttccttctgattttaaaagaaattaaacatttttgagggctcctaaaggtactgcacagccaagactacggtctgactggaagcaccaggagtaacaggaggcagtaaacaggagtggaggtagggaagattctaaggcttgtaaatttcaaggatgagcacattcggtgcggtgtttagggggtgagtctagagtgctttcatggccaaggtcaacaggcattattagagtgcaccaggctacagaatgtgagtttgtcctgacgggggtgggggagaaaaagaaggaaaacaatcactacctccctgatttattagcaaacatcccattctgtctagccccacatcacatcaggagttctaagagtcaatctggcagagcaattcatctacgtttcattgccttgagtgatgggaacttattttaattttcaaaactagcatatgtttaacagacttgtgcagagctgcctatgtgacctggggaaaaaattatctggactctcaccatgcagattatcagcttgaattgctaatgcattccttacccccgacggatgtctttttgacatgtctacagaggaataagccctaaaacacagaaataacaaactgtacaatctatatctcgcccttgggcaggaggggtattgcactgtgtgggaaagatttacattctaccaaaaaatctaagcaaagagtatttacataagcacaaaaattttttcacaaacttgttcaaataaactaagagaagaacacaactgtgatcgcaaaacagataacatcacatagattctggcttctgactttactgctgttgttcatagcatgtaattctagataataagaattttaggtaattagaatagaagtgcctcttcagatgtgctaaaatgttacgtgcatggctgtttctaaagagggaataatgttggtgtacacctaacgctaaccaactgtgccctaatgaaggtaaatccccaaatatccataacactcactttgttttctgtgtacggccaatctccagtcaagagctcctttaccctgacactagtctcacccatgttgttcagctatgcagtggttctccaacagggtaagcttgttaactacatgggtcctaggccactttgctttttgagccctatgaactgtttctaggtagaggttcaaagttcttggcaaagatgattgtcacgacttgggtggtgctactggcatctatctagtaggtagaagctagggatgttactaaacatcctacaatgtacaggcagcctccgctgtaggccctcccccacccaacataaacaattatttggctcaaaatgtcagtaattcccaggttgaaaactccaacctaagcctttacttagggggaaagagtcatgtcttactgttctctgtatttctatttgttcacagaacaaaattagcattcaaatattggttgaaccaaacagagtttccactcaaaacataattaatccaactgacatcatataaaacaataactatgtaaactgtaaatcctacaaaatacagcctcccttccacagaagcaaaaaaaaaaaacgttaatttttaaaaggtagttggtgtatcaaaagttattaacattaagcaagataaccccttcaactcaagattacagaagattgccccataattatttcatataaaatgatcaaaaataattttattgtattaactccctgtgggtcaatttataatagtaatcttttaattaagaaatcttgagggttaattatccagctttcatttaaaaaaaaaaaatgaggtggtaactatttctgggcaaagttcaccaggaagcaagacaatgcactcataactagggttccaagaccaagcaagccagtcagaatctctctgtaggtaaagactttcaaattctagccaatcatttcataatgaacaacttagacaaacggagaaaaggcttaaaaactggaatctctttgaataatgtattaactctactggaataacaaatatatactaataggttacataaatcaaaagccctatgaaaatatataactaaaaaaattattgctagaaacctctctatgtcttgtatctgcaactatgaacagggtctaatccatcactgtctatatctctagagacctcaggggacttacagctgggtcagggtcactgtaggaactggctgaagggacccacacatgaaagtaccaatatgatctttggaatcaaaaggcaaaagtcaattctgtatttagtaattaccagctgtttggagaaagccagttaactttacctcttgatttcctttatctctcaaatggacatagtaacatcccacctcacaggatattatgaggattaaaatgcagtaatatacataaaatggagagtaagcactttaagagctaatcatattgtctcaacttgtatctagcaggaagagggaaaagaaaagaaaactaaaatgagcacgttcgtaagacatctggggagcctgaactgatgaatacacagcatttgaaatctcctgcgagctatccctacaaagatacctgctatttattcaggaaccctgagagaggatttcctgcactaaagaaaatgctgactatataaccacatatgacacactggtttaaagaatgtcttatgccatttaaaatagacaatctttccttgtttatctgcaagacgtctgcctgccaagttgtctctaaaagagacaaactggtaacgacactgcaacacgtgtgtcgtcaaccccagctacacgctcagtgtggcagatctgactcaccaagtctacatagtatttttaaactatctaagatattttaactcatgcagtttaatggcaattttagctcttttcagaatgtctgatataaggttcatgaagtccactctgacaatttactatccgtgaatcacaatgattctaaacagagctaagaagcaaatttcaagatattaaatttttttggttcatttctttagccacagtattaaatttgtttctacacagaacttctcttgtgtaagaaatttgttattgcatgcttataccactaagttattaaatatatcactagtaatgtatactcaaaatggcccagtgaggtttaagacattcgtttcgaagtatgaataaatgcctcatttcatatctaattcagtgttctcaaaaacagttttcagaaaatgtcaacagttattacctgggagtggggagaattctgtcataaaacacatatgggaaatggatcattcaagatggatactggaggcttttgaaaaaaaaaaccgtaataatgaagtcagtttaacttttttaaaaccaaggtttcccaaaatgtatttgaccgtgggccacttccattgtgacacatttaacatgcttggaactgaatttgaaaaatgtactaagagatttgaaatggatgatcaagcaaaacttaaccagatcattctgagtgaaacaaaataaacaaaaccaaaagaagccttaaagggaacaaaagcaggagtgttaccaagctcctgcagaaatgatgattataataacacatcagatttggctctaggcaaaataattacatgacatgaagaattgagagcaagaaaagagaggattagaatgaaggagtgtttccaaaggcctaaaatatttcagaagcaaatcatgagcattcagaaaatgccaaaagggtacaagtcaagaattttataaggtcccaatgcagtgtaaaattccaggtcttggacaggcaccatggctcacgcctgtaatcccagcactttgggaagccgaggcaggtggatcatgaggttaggagttcaagaccagcctggccaagatggtgaaaccccgtctctactaaaaatacaaaaattagccatgcgtggtggcagctgcctgtaatcccagctactcaggaggctgaagcagagaattgcttgaacccgggaggcagaggttgcagtgagctgagatcacaccatgtattccagcctgggtgacagagtgagactccgtttcaaaaaaaaaaaaaaatttcaggtcttaggtcttttaaactatacaggtgaactaaatcatggtggtttgttccaaactaagttaaattttcacttagcgatataaacgtgagatggctaatgacaagcagatgcacaaattttatcacatccctggattcctaaattgcatttgtgaaattcaataaagtgacacgaagtatagacaataagtgaataagaactaagaacagaaaaagtagaagacatggatatctgcagcaaagcccacacccgaggggagaaaaacattagtgctgttgtttccatgatacgagcacaggttcctacactgatttcacaataaaaaatacaaattacttctaattttcccattttcacacaagtgaaagagagttcagcccaatttctgaattaaattttccttcctatagagggaaggtctttagaaaatctttacaaaatagtactacacatgccttgtgatattagggtgatacggtgataaattaaaagcaacaggtaattaatatgattaatgtaatacccagagaacttcactatttcttaaatgttttcctgagatgttatattgaaacgttgtgctaaatgtcattacataaaatgttgagcatcacacaacagctgacaaactaaccttccaaaaagaaaggaatagatggtcattcacacgaaggttacattttacaaacaaaactggacacacaataccattctgtgatgtttaagatacaacaaaacatgtactgcttttttaaaaattgctgtaatgaggctctcacagttattcacgttttatttagctacaagttttaagatatctgtgaaagaaaacttctttgttttaagttcttgtttgaagatcaccaagcttctatagtgtctctctgaagtggtgacacgctgacttccaggcacaagccaggcacaagagaagctctgcaggaaacagcaaggccactctccataaggagacaggcttggccatgacaactgtggcttagagctgaggagcacagcaactcacaactaatgtctttgaattttaggtaccagcactgagaatcaagttcctttccatgttttaagaaactaataaaatcctcaagaagacctgttttagatattcatgacatttcctaaggcattctataatgttaaaatacttagaaatgactcaaccatttggctaagcttacgctaagggcaaattcctgtttctagatgcgtcaggtctggacagcaccaatatgtgagcttcaacacccagagacttgacttctatttagcaatttatatttttagtagtagccttcccttccttccttccttactatcacagaaaagaacaaagaaaaaaaaattctgcttcaaaagccaaagagttcactactaagaataaattctattatcttccttagactatgcctattactgggtaatataaatatatgttgttggtcagatgcagtggctcccgcctgtaatcccagcactttgggaggccgaggcaggtggatcacgtgaggtcgggagttcgagaccagcctgaccaacatggagaaaccccttctctactaaaaatataaaattagctgggcgtggtggcactcacccgtaatcccagctactcaggaggctgaggcaggagaatcgcttgaacccaggaggcggaggttgcggtgagccaagatcgcaccactgcactccggcccaggtaacaagagcgaaacgccacctcaaaaaataaataaataaataaataaattaattaattaatttaaaaaaaaaggtctgttgtcaatgaagtagtgaaaaggcccgtaaaacaaaacacttcattatttaccaaaggagcaccgaggttttccagcgaaatgcaaccattttattgttcacagtgattctataaacgtttttcctttaagacaattgcgcatagagcaatacactcagtcagtcactcatatatttgttggctctttttactaagccaaaacaaagattattaaactcttattagagacaacaacagtgtaatggaggcatgcttaaataagggaaataagaaaatttatactatactgagtataatttaagcattgatagccaaatgaccaatacggcaatacttgagaaatgtccagtcataagaagctcctctgaacgataaagccaaacttactgacaactgacttgaactaatacctaattcaagtcatctgagagatctaaccaactgttctcatcagtgagaaacattatatgttatctattgcacaatatgactgaaagatagtcatgtcttgaatctcaaatcttcagaatgataaaccacaaaactctactttgacacctaatgtatacagatgaatgtctgtctacttcctactggaatcgtgatagttgaattaagatttttttttttttcactcagatcctgttttcttaaataaggaaaaacaataataaacttaccatattaaacaactaaaaatcagttgtccatagatgacaaatgtgatacaatctagctgtcactagataaaaggttaattttgtaaacagagtcagttaaaaaaataaacaaaaaaataagcaatttaagataaaagtactttggcatggtgagacattacactcactggggccaggagttcaaggctgtagtttgctatgatcgagcctgtgaatagctactgcactccagcctcacatagggagaccctatctctttaaaaaagaaaaaagtgatgtctcaaatatggtgtttgggactcactaaaaataactaaatttaagggggaaagattaaattggtattatatatgccatatgcttaaattctgattttagctcaaccttataattaaatctgtactttgcacccattagacatttcagcaaactgaagttcattcaaatcaaaatctacaaaaagaacaagatcccaaggcactgaattagacttttaatattcaagatgtaaaataggcactcttttaagaaattacttttagttctcctctacctttaaaaaaaagtttctctcctactcgtgaactaattcagaactttacatttctgttacacagcatatgatttctgctttattacttggatatctgtttagtattcacaacatatatgtatctccattaagcccagaattctttgacagatggtctcacccaaagaactcataaatacttgattacttcaacttagtttgcaaaaattaaaaaatcagtaaattatgttacagactatagtattttgagtgttaaaatcacttctaaagaacaccatcacaacagaaccctaaattcagaatcgggttgacatggtctaagaaagtgaataaacgggtaagtgatcttcctagtgcatcatattctacactaaaaattcaccatttatacttcatttctgaaactcaatgtcaaagagaagattaaaaatctgggggctgggcacagtggctcatgcctgtaatcacagcacttagggaggcatgggtgggtagatccctgagctcaggagttggagaccagcctgggcaacatggcaaaaccccgtctctaaaaaaagatacaaaaattagctgggcatggtggtgcatgcctgtagtcccagctacttaggaggctgtggagggaggatcgcttgagcccagcaggtcaaggctgcagtcagccaagattgtgccactgcactccagcagagtaaaaccctgccccatctctcaaagacaaaacaaaacaaaacatctgacagttcctgagtaatcggcagcctacgtaaggaacctattaatactgcatatgcaatttttattaacacacttgccaatatcctcattttaggactagtctaatgtttgtatgatgccagactaattttgaatgtctgaattattcacaattactaggaagacaaatcattagactatggattcagtctacaatcttattctatatcttttggctatgttaactgattaacaactagaataggccgggcgcggtggctcatgcctgtaatcccagcactttgggaggccgaggcgggtgggatcatgaggtcaggagttgaagaccagcctggccaagatggtgaaacctcatctctactaaaaatacaaaaactacagcacgcttgtaatcccagctactcgggaggctgaggcaggagaatcgcttgaacctgaggggcagaggttgcagtgagccgagatcgcaccactgcactccagcctgggcgacagagcgagactctgtctcagaaacaaaacaaaacaaataactggaataaagaaaacagttccctgtccgtatcaaaccaatcagaaccaatataagaaaatgctcttccaccaaaatacagatttgatatggttgaccagataatacatttctcttcctggccctaatctagaacttaacttggttgtgactttgatttctgacatttacaaaatggcattcagtcctttataacccattgacttcgcttatgttgaaattcctttgcaggagtttccaaacatgttaaagtacagcatttggaggagaagcaatgtttgcctcctggactcaagcgatcttcccactcagcctcctgagtagctggaaccacaggtgcacaccaccactcccagctatatttgtagagatgaggtctccctatgttgcccaggctcatgacaaggaatactgcatgccaataatggatgccagctgagtgtcctctaattcaactggattctgacactgtacttggagattacacatcccacaggctgagggctcagtaccacaaaactcccccaacttcagatgtcaatcacaagccccaggttgtagcctgtgcttctgaccaactggctaccattccccagaccccttacttcgttttgattcattgctggagcaccttcagagaactaagagaaatacttgcttacattcacccatttattttaaaggatattacaaaggacacacagatgaacagccagatggaagagatgcacggggtgaggtgcggctgaagagaaaacgagattccatgccctttcctgacatccaaccctccaggaacctccatgtgttcagctatctggaagttcccagaacgcggtccttcagggttgttaagaaagcttcattatgtaggtatcattgatcattagtttatcaactcaaacttcagctcctggaggttggggagggtgactgaaagtcctaaccctctaatcacatggtaggttacccagccaccagtcatctcattagcatataagaccttcttagcactggagattccaaggattttaggagctaaatgtcaggaaacatatacatcaggaagaccaaatagatgccacagtatcacatgaccattttcttggagtcaagatatttgttcttccttaaaacttcgatgtttctaaatatccaaggtatccacataaggttaaaaataaacttctcaccactccacttgtcatttaaaatcatccaacattttaacatttcatcaaatctctatatctatacaatagtgcccatctcttcatgtttttaagagccctgtcctcacactattcttagtgaatagacagcaagagatattattcccttcttacaattatgctctgtgcataataagatagcaagccaaagataaagccaggattagaagtactttcttaaattgagagcttatcagaaggtaaagctggctaacatgattatctatgtaacagcaccagaccttctcacttcgaaattcaagacatctccaaccactcagaaagggtatgggggttgaaaacagccacattatatgcacgacttctataacttaaagatagccaagttcatatcaaactaagttattgaattttatatcactttctaacaagtaatcatagaaccatgacaaaacatacaaaatacagaagttttctccttgacttggtgcaaattcaatccaattactccacagacctcttttattttagtcactcaaactttgatttttcatttccttagtcgtacattaggacaaatgcaaattatatacagaaggcagcacatttagccttattatctcaaactcattcctaagcaagtacatctgcctggatggtgaggcctccatcagaggttaaatgcaagccctagctgggaaagttactggaagggcatgtgtcctacctgcctttctctctcatcatcccagatctttatctccccaatgtcaccacattaggagtgttttgcatataaatcaaaacgaagccccagagagcccttggtaggaatatctggacttgtgttttagaaatagttttgtcagccaggcacggtggctcacacctgtaatcccagcacgctgggtggccgaggcaggcggatcacgaggtcagaagttcgagaccagcctgaacaacacagtgaaaccctgcctctactaaaaatacaaaaattagccaggcatcgtggtgcacacctgtaatccagctactcaggaggctgaggcaggagaatcgcttgaacccaggaggcagaggttgcagtaagccaagatcacaccattgcactccagcctgggcaacagagtgagactctgtctcaaaaaagaaaaaagaaaagaaaagaaaagaaaagaaagaaaagaaagaaagaaagaaagaaagaaagaaagaaaagaaaagaaagaaaagaaatagttttgtcacatacacatctgtgatcctctcactctgcacgccactgcctctctgaaagaaccaacataccacacaggcacgcacacgatggacaatatacagccaccgagcaatcatatacatcttttaaaaagaaacaggcaatttcatgattctactgtaccctggatccatcaggctttatctagggagtgctatttttaaaatatgtacaggcttttttaggtcctcagtaagatcatggaagtgttttgctccctaaggaaaactgaaatttgaggtataagactggagttttacacctctagaattcatctttggtaaccatgcccatttgatttataaataatctaaaaatatggatttttaaggagcagtgtatttaccttagtccacctcatctttttcttttcaggaatgttatcacaaaaatgtgtgctgattacttccttgtatctgagctttgagcaacttacaaggcagacactggacctaaaacacaggttggttgttttagaagaagaaaaaaaaaaagctggttttaaatctggatttaagtcttggccctgactccaaagcaggccagtttatgtgcctgtcttctgttgccagatctgtagaaactagaatgtcattctccgctgagaaaccacaaactagtttccttagaccattcgtcttcctttttgagacagtctcaatgtcacccaggctggagtgcagtggcgcgatctctgctcactgcacctatgcctcctgggttcaagagatccatctctgctcactgcacctatgcctcctgggttcaagagatcctcccgcctccacctccgcctcctgagtagctgggactacaggcatgcgccaccacacccagctaatttttcctattttcagtagagacagcatttggccatgttgcccaggctaacatcaagtgatccgcccacctcggcctcccaaagtgctggggttacaggcatgagccactgcgcctggccctccttaaaccattagttttcaaaccgtatttgaagttcctcagaggtgcgccagtatttgagagaaggttaaggtttcaatgagagcaaatgagattttaaaatcttttctataaacgggggttctatcccatctaaattttgcttttttatgaaaagggttactgccctttttttaaacctaagtaaaaacccataccctttactttgttacaggtgtgttataatttcaagttgtcttttaagtatgagataactttcattgttacaaaacaagtgggttgggagtggatcaacgagacggaggtttgctccttcatttaacaaagaaacaagaccagagagctctttcctcactgggagttagaaatgaccacagacgctaagaacagaaagcaagacaccaaaactaagaaaggttttaggagctacaatctctcatttagaaactccagatagaattttaaagaaaaaagtaaaaacaatatatttctacaattcaaataatataagtcagagtaaaaaacaaacaaacaaacctacttagcacaacataaaaatattctggttactcatcctagagatttaaaaaaaaatcaggaggtgaggcaggtcctatttttgttccttcatttagtggatctgagtcatggctgttccaatgattttcctgatgaaacaaaatacatgtttgttccatcaacaaagggctaccctaggaaactcatcttctactgcagtaagaagggtatcataggtattttttgtggttctaatgggtactcagaaaatccttatgtgatttaatatactcttaaaaggaccgtctgaaaccaaaacatgtactaatatccagtggcctttctctctgtatactggtttaataataacattctgcatcaaatcctttcagaaacctatgaacagaagtaaaatgatatgatacctgagaattattttaaaatgcttcagaaaagaaaatggggcagggggaggtgctgaaacaagaacagcaaaatgtggtcaatttttgaagctggatgatgtatatgtctgaaatttaacataataagttttaaaatcttcttagagagttggcagatcatatactatacacaaatattgtacatgttataggatcaaaatatgggattaaactaagggactgaaactacttatagaatgtcattctcaagccaggcacagtggctgatgcctataatcccagcactttgggagatttcttgagcccaggagttcaacactagcctggccaacacagcgaaactctgtctctacaaaaaaaaaaaaaaaaattagccaggcatggtgttcctctcctgtagtcctagctacttaggaggctgaggcgggaggatcgcttgagacaaggaggttaaggctacagtaagccatgatgactccatggcactccatcctgggtgacagagagatagcctgtctcagaaaacaaaacaaaacaaaacaaaacaaaacaaaacaaaatcctcctgcaaatattctgttggtggatagttttcaatgtatacaatacagtcagtacctgttactcaatatttatccattgcaaacacaacacagaaacctaaggaactcaaaaagcaaactgacatttgtcaggaactgctcccttgttggtcaaagaagaggaaaaggagggctttcttcgatattattgtctactttcttggtaagcaataaagtgtttgcagttttatgtagactggcggggtggggcggggaattgtgacacggttacactttcgtatatatcaagttactcccatacatgattttaggtagagtctgtattttaatgtggtagaaaggggtgattagtatcttgaactgcagaggctacaaaaaacaatgatgcaacattacgtaagggatgagaaataagtaaataagtaaaaaaaaataagtaaattgaaaagtttgttaatgcacaaaaccaagtaactggagagaaaaggacagaagagtcaaagaatcaaggtccccagacctagagtgagaatgtacattatcgtgtgcataccttaatctcaaatataagctcattatcaaataattgtgcaaaaaaatcatctgttaccttgtgaaggatagaaagggttatttcttccaaagctcaaaatgtggtccacagataaggtaaggttacattagtggttctccaattttaacttgcaccagactctactcaaggttttgttaaatagatctctgggcccactcccagaaaacggtttgagaactatgtgtttatactatggctaattcttgcaaatcatctgattttgaaaccagtcacaattttttgaaacattctatgagaaacatcttattaataagaattttcaacagggctcagtggctcacgcctgtatcccagcactttaggaggccgaggcaggcagatcacgaggtcaagagatcaagaccatcctggccaacatgatgaaacctcgtctctattaaaaatacagaaattagctggacgtggtggcacacacctgtagtcccagctactcaggaggctgagggaggagaattgcttgaaggatgcagtgagccaatatcgggccactgcactccagcctggcaacagagcgagactccgtctcaaaacaaacaaacaaacaaacaaacaaacaaacaaacaaacaattttctggcaaagtaagagtattttacaaagagaacaatcacactggtagagaactgcactgcatggatggccaaattaaatcattacaccaaataatttgcaaacttcatccctactttggtcacaataagtaacattgtacttttgaaagatattactgtctgagaacagagtttcatcttacccaaatacagactaaaaacaatgccaacttcacagtactcacttacatagttgataaacagaaccaacaagtcctctaattggtccatttgaatctggggaagagctggctccaatcattgtcaattacatcagcaactgtggaatactccctgagatcaacaaactgttaactgcagtgaccacaacttgacccaggccagagcttccatcctcgggagggtgagtcaacagcatgtcaacactaacccaacttctaccacgcacagcaaggctgtgctatttaggcgtggatcacacgcacactgcgccaacttctaagctaacaatggacaaccaaagcctccggaactctgtcttgggtagagtaaatcaatttccttttgtaggattttcttggcacaaagccaagtgtcaggggctgtggagaaggaactgctggcccaaattccatccaaggttgaccagtggtttaatcccttctctaaatcaggcctctggcaaaacagctagaatcaggaagccaattcatatttaacaaattcaaagtctatcacaacacaggaacttgttaggcaagaagataactgaatgaacacctttaaaaattctgcttttttaacaaaagctgtctacattattttctcatgggagttttggtactagtgttaattcatagactctcccttaaactcaaataaattatctattgaaagaatggcaagaagtactgccaaacttcatagggtggttgggctaaatgttctcaagttcttttccaacgttaaaacaaccggattataagaaacaattcatttaatggagcattctggaggagtaaagacagaggatttggaatgagactgcataggtttaaattctaacactaactgtaattctggccaaaaggttatgatgtggggtcctcatctgtaaaatggagtatctatctcatggagtcagtgtgagaattaaataagcacataaatttctcaacatgacgcctggcacctagtcaacactcaaaatagaggaaggctaataatgatgacatgcaaatctgatattgcaaataccaacgcaaagagtctaatgaaaactttctaaattatatgtcattggttcattatttaagcttctgaggtttgtacaagcacagattaactcaaatgttacttaacgttttacatttactataaacaccctgatgatgtattttacagtttcttgatttttccctacagtttgggcacagtcttattatgacagaaaagaaagcaacaaacccaaaggaaaggcttttccctagactgcttttaattttctattaactgcccaattttgaaaaatagatctacaaaactgggttctggatgactgagttcttttactttggggacaagagctgatgctaaaggagaagacagaggattaagaaatttacattctgtcatttacaaacatgggtatgaacatgaacagagcctctgaaaacatctggcaaatagaagacactatgagccaatcaatcaccaatgctggcttagtagtcatattaataaatacttgctgagtatatactatgttctctgggctgtattatttcttttacgcctcacaacaaccctaagtttggtacttttctatcggttccagtttacaaatgaagaaacagggaagagtaaggggagttttcaaaaagaaataatatcaacagttattacatcaagggtttcacaaatgaagcattcaaaaattcagaaaggcaatgaattgctttgctagacctgtggaaggccctcaacctgcacaggtagccaacacccggtacatacccaattacatccagttaggtcacctctgtatggctgcaaggagccagggccatgtgtggtgcctagccacactatatacataacctgggaaccatgcagcaagatggaagaataggaaacagtatccagaatccagatgttagatctcaggggtagggtatgcacaaggagtatttgcaccatttaaggtgataacgctgctgtctcatggcaacatgcggggcagtataagaggcttggtaaatatccactggaccttccctaagcttagcacaatgcgtcctggatggagaaaatatcaaagccaccaatctgagcatgttgtggaaccagagagacttaagaggctgcaccaccacacagccctcactcgatctttctaggctctgctaagaatgttgctgctggctcactgcagaaactaacacttactcaaagatggtgcatcctgtgcttattttcaccaagcctcatatccccttctctgccagaccattttaataccattagatacttccctattcaaaattaagacagtgtcactggggccaggcacggtggttgatgtctataattccagcactttgggagatagaggtcggaggctcgcctgaggccaggagttcaagaccagtctgggcaacacagcaagaccccatctctacaaaaaatctttaaaactgctgggcctggtggtgcaaacctgtagtcccagctactcaggaggctgaggtggcagcatcgcttgagcccaggaagccgaggctgcagtgagctaagaccacaccactgcactctagccttggcagcagactgagatcctgtctcaaaaaaaaagtaaagaaaaagtgaaaaaaaacaaaaatagtgtcactcagcatcacttaagaaaattaataaaaataggtactacctgtatttcagagataagtaaaacttatgttgaaatggtcaatgctagatttttataaaaagatgtccaatttttaaaaactcattcaagttataagaaattttataatctttattccatgtcaaagataggcattagaaaaattcagtattactttactttccataattgtcaacttttataaacaatgtggtggagtgggaattaaaatctgataatagttttgatccataaaatgagtgggaaaatcaattttaaggcagaaaaaaatgcttcaagttaaacacttactattaaatatttaaacaaaaaaatgtaataaagataccttcaaaactggctgggtgtgatggctcatgcctataatcctaatatgtcgggaggccaaggcaggaggatcacttagcctaggagtttgagaccagcctaagtaacatagcaagacccagtcttaaaaaataataatgatgatgaagttttgataatcaaaagttattatcccttttggctttaccatagagctacagataggtgtcctggttaggtcacttcttttattcttccctagctttactgaagtataattgacaaaaattatgtatattcaatgtatacaacgtgatgttttgatatatgtatacactgtgaaatgattatcacaatcaagctaattaacatatccatcacctcagagttactttttttgttctgtgtggtaagaatatttaacatttactctcgcagacgttttcaagtgtacaattcactattattaactagtcactaggctgtacattaggtattaatctcataactgcaagtttgcaccctttgaccaacatcgcctcacttcccccacatccaaaccctggtaacaccacccttctactcttgtttccatgagtttgagtgttttaggttccacatataaatgaaatcatgcagtatttgtttttctgtgtctggcttatttcacttagcttaaggccataagtaccaggggcctggatttcaacctcacccctattgtttattgctacttgggtcaaattatgtagcctccctgtattaatctgatctcacgctgctaatgaagacatatccaagactcagtaatttataaaagaaacaggttgaactgactcacagttcagcatggctggggaggcctcaggaaccttacaattagggtagacggggaggcaaacacgtccttcttcacatggtggcaggaagaagaagtgccaagcaaaaggggggaaaagtcccttataaagtgatcagttctcgtgagaactaactcactattaccagaacaggatgggggaaaccgcctctatgattcagttatctccacctggtccctcccactacacatggggattatggggactacaattcaagatgagatccaggtggggatggagccaaaccacatcactcactgaacctcattttgtttatacttcattttgagatagtatttgctctgcctttctgataaagctatgcagaataccaagttagtacctggtttcatatatggtttataatacattattcctgatacaatctcaatttactgtttttatacagcctattactgcacaaacattttatatcttaagcaatgtggattttattataatctcctacactaaatagttataaaaacattagctattggtttgggaaaggctacactcaatcttaaatttaaaagtcagttacaattttccattaaaaaaatacaaaataagctacagatgtcttatcatggtcaattctcttgaacaactttctgggttaaaatgcagaaaatataacagatctcagtatacaattcagtgggagaaagaacagttccactaaactgctttcttctgacttaccatgagaattccaaagatagcattaatgtcaacttgaaaaatgatattacaagcaccaatgctagaaattttagatcgagggagttgctccttgatgttcaatgtgctgaacaaagtaaagcaaatgggcctgaagtaataatttatgcttccagtactttcaaaagcaagttttgatataagaatcagttacccatgaaaatagatgaaattcactgaaatgacctagttttataatacaataaaacgttcttttcaactttataaaagtaatgttcctctgaagaacagctgggaggattctagatatcacatcaaaatacgtgccttcctaacattagagatgttttacgtggaatgggatggcttgcctgtgggatgaagtctctggggagaactatcaaaagctggctgactacctaccaggaatggcagaaccaaggagtcctacattcaagatgtgccaagagggagcagcctctaaggcagtgatctctaacctttttggcaccagggactggttttgtggaagaccatttatccatggggtgttgggggtgggatggcatgagactggatgggatgggatggttttgggatgaaactcttccacctcagatcatcagacattagttagattctcacaaggactggaccaggcaacctggatccctcccatgtttagttcacaataggttttgtgctcctgtgagaatctactgccaggaagcagcactcaggcagtaatgctcactggctcacctgcctgccactcacctcctgctgtgtggcccggttcctagcaggccatggaccagtacctgtccatggctgggtgttggggacccctgctctaaagtatctgcgtacagttaaaaagactcaaatagtacaaaaggtgataatatacaaagtaaatatgtactaccttctcctccattccaatgttctcattgcccagagtcagattttgtcagattcacttgaatctgctactgacataatacacatataaattttctgttttttatataaattactgtttaatctgtgattatgcctgcattctgaatgttttcacttatatcggtatgattttagatatttctatacatcagtatggttatgcccacttttaatgtatcagcataatattctactgtataagagttttttaaaggcttgcttagttgatacaaataatgctctcataatatcctcatctgtgcgcatttatacaatatactatgaactaattagtttctagaattcctagatcaagggatatgtacataaaattctaaatgactgatctaaaaaatttctgtaccagctgcatgcagcggctcatgcctgcagtgggcagatcacttgaggtcaggaattcgagaccagcctggccaacatggtgaaaccctgcttctactaaaaatacaaaaaatgagccaggcgtggtggctcacacctgtaatcccaggtactcgggaggctgaggcaggagaatcacttgaacctgggaggcagaggttgcagtgagtccagactgtgccactgtactccaagcaaagaaatatctgttatcaattgacagtagatgaaaatgccaatctggcaagcctttttagtctttgcccatcagggttttaaaaaacaatgttatatcactgttttactttgcatttccctgacgactatgagattgagcatatcttcataggtttattggctgtgtattttttcctgtgtactataaaattctttgccttttttgtccacgtctaatagagattctgttagacatccacactgaaatatttatacataaaattatagaattgaaattatttcaaaataacccagtgagggaaaagagaattgagcaggttgagaaaggggaatacagataaaacaagactgggtgagagctgatcattgctgagcattcagcgcactattctctcttgtgtatgtttaattcttttcataataagttttcaaaaatgttcatttttctctgaagatgttcatatttagtatttcttactgatttgtaagaacacttcatggaataaaaaagtttgccttttgttgctgacaaactgtactgggtacataatactaggtaatccagtattggtactgggtaaataattacccaccttccttctatgtacagtcagataacccaacaccattaactaaataatccatctttcccctttctgatgtaaaaagacacttttatcttgcactaatttccaatatatgcacaactttatttctagacttccagtttgccccattgacctatctatgcatgggatgtgcagttttaatttctatatctttacattttgcttctggttttttattggctattcttacctaatggtttttcccagatgacttttataataattgtattaattttcctaagtatctactacacttataaacacccctccctgcagaactccttcccaaagacagagagcctgcttttctctttcacactggtatgtttttatgtttccacctagggtctcatctgttgcatgcaagctcagaattcacttgacatgctgatagcatataatgttaaagaattcttctctcagtgtaaaaaatatttagctactgtggaaggtcaaactgctaaaaccgactggtgtaacatttgaatgctgccctttatataagctttatttttataaataagcatctgactagaaagtcagtaaaagagcatgatataatcagtctgaagcccagtgttttaaatataatacactaattttagacccaagtattttagttttgctttattgtctacagtttcttaagaagatgtaacttaaaagaaaaaaaaaatcttttaaatggctcaatcaatttattagaaataagcggcaaagagcatctgttcccacagagcaactgttaagttaatccccattaagtcggcctcaaagcacttggatgcagctacaggatgtgggtgtgataggatcacacaggcgaacacctgatagggccttacacacaccgggctaatcagaacatcaaaaaaaaaacctgaagtctcttggaaggactgaaaaatccaatccctccccaacccccccaaaaaaacctcccaaaacagactattccattcaattcagattttgtgaattaatgaaatttaagagccacctgaaaccaccaaagatacacagtgattttctcccgaatctaaggtccaaatgacacaggtagaaaaatgcactgataaaatgttaacaaaaatgcatgtctaatacttagagctacgtgtgagcaggttttaggagaaggatattgattctccctgaggcatgagcattacccaccatttcaggaagcctctgcaagtggagaagccacaaaccccttcaaaaagatctctcaattacccacttcccagtcccctctgatatgtggtaaacaattatttcaatgaggttggcagagatttttcaaagctagcaggcaggcattttgcagctacctccagctggtccaagcagccaaggctgtcaccagtgcctggtcaccgctgaaaacacaaggaggggcaggactagggcaggagagtagatggagagagctgtgtcccgaaccaacattcttgagattcctttgctagtgttttttcttcagggttcactgagaagaggaaggtcagatggggagggacaaaacccaaggaaatgaggctcatttcaaactctaacaacttgatcacaaacaaaatgtatgtagaattacaaataagttattctgttttcaggcatcaaaaatgttatcaatgaaatgttgagatgctaaagcagtgaaatgtgaaacgaagcagtgtcacaggcaactgggcctctcccctggcccatcccaggagggatgaagggtggctgatatgaactctaaggattattctgaaggggccaacaaatgttacaaagaggctcaaaaataaaaatcagaaccatttttccctcattcatccagggcctactcctggccatgttctgtgctttgcactttattcaatttaattcaatttttctcctaagcaatctatttagatactttgtagatgtggaaattggtttagggaagcttacatcattttcttgcagtcatatttctagtaaattgaaagagttgtgactcagatccaaggtctgaatgactccaacatccacactcagaacttccttcacttgggattgagaaaaagggaaataatggaattgggagggggagagaagacaccaagtagagatatcagcattcagaacttcctgcaggagagggtgaaagaagctggcagccaggaactgagggccttactgattactttagtatcttaccaatcaattgcattccaaggcttgcttacttaggaggctgactgcttagtccaagaagaaacactggctgaactctttgacttattttgctggaggcagagaagataagtggttaagagtaaagacaatgaaaacatagtttaaacccagtccactggccagctccctcccagctggggataacagtaggtacctcacaggctgctgaaaagaaaaaattaagtgaaagcacttttcaacaaggcctggttcatagaatgagctacatacagtacctggtaattagtattactattgccacaaccaaggaggcctctcagcaaactatttttacatatgccagaaatacagttattttttccagactaataaatcacaaacaatatggcacggttgaccgccaggttactgatgcaatttcttttcactggaaccaaaaaacaaaaccaccaccaaatctgaactaagtataatacaataattctccctgtcttaaattttaaaatacagaagaaaagatgaattgctgtatactctaaacgctcttttaaatgtttggagtacagaatgtctttcatgaaatcatcttgattaaaatgtacattcttttccaagaagggagtaaactgagtatggaagaccctcaccattagtttttataaatgattgatcaatgggaatcgtcactgaaaaattgcatacaatttttggaatgaatgcaaattgatggaatgtttgtaagctcatgtgcttcttccaacaccccagcatgctcccacctcacagcctttacactgtattgttctctccaggtttaatacttgtagaaaaggggaaaaaaaccttttttctctaccctgttaggttcagcacatgaggccttgccaattaaactgacgagacagattcgcaggggaaaaaacacaaattttatttaatgttattatttttacatgagggaggggagaggagggagctccacagaaaagcaaaaacccaaaagaagcagttaggcctgagagcatacacaccattttaacaaagagcaataaactgtggagaagtcacaagacaaaggagaggggattagggcttccaggggaagtgtggtaaggtaaatatatgggggaaactaatagaagataagggttatttcaataaggtttgtttctgcaggcgatggtgccacctctagtggtctctccagggatggagaggggaaggaggataccttcacacagcaaaatttttataaaaagggggtaaagcttgtcctgggtctgctatttctcgattgtcttcagctcaaattagtactttgctgaaatggcatatttgggggtagcatattctgatccccttcatacccttccagactgtgtctctatccagctcctcactggcttaatttttcttcatagcactgaccaccaagtggcacagagtatactgattgacatctagatagacagatagatagacagatagatagacagacagacagacagattgactgatttgctctctgccccacccaacaaagtacaagctctgtgagatcaggaagctggcctctttcatggttgtatcccaatgcttggcatagtgttggtgttcaattaatgcaccaaataaatgaacggatttccatattatatcaatattttcttacaattagaatttctgtgatgttgatagtgtaagaatttgtttttattagttttcaacagtatcaacatttactcattatgtagttacagtattgtatttttttaaagtaaacaataaacaacactgtctttgctccaaatacctataatgtgaaatatataaaactggccgactgaccacagaaacggcagttaataatcaaaattacatgtgtctggctgaatggactccacgaccttacactaggttctgtaacagcagcatttcatcacaatttgttaaatttgaagataaataccgtctcttttctggtcaaagattcttatatctttggaaacttgacagaattaatgtttttgacttgtttttcaccacataacatcaggagagactttaacagcagtgaagtggcaaggaggacgctttatttatatccgtgtaatcatgtaacccacttcatgctcccactgaatggctccagtaaactgaaatcacaatttcactaatatctacattccagctccagctacatttgcctgtcaaatgcaacaacttacagttaagcttctgcctacacgagcaatcacagaaccattaaataagaggattgcttgtttgaactactagatcagcctttccttatttttgctaatctgtgtggtgtacgttcattaccttttttttttatgttaaagaccaccatgcgtaacactacttgacagcagcaatttatagcagtggtccccagcctttctggcaccagggaatggtttgatgaaagacaattttgtggtttggtttcgggatgaaactgctccacctcagatcatcaggcattagattctaataaggagtgtgcaacgcagctctcactttcttacatgcggttcacaatagggtttgcgctcctatgagcatctaatgccctgctgatgtgacaagaggcagggctcaggcagcaacactcactcacccattgctcacctactgctgtgcagcaaagctcctaacacgccacagaccggtaccagtccatggcccaggggttagggactcctgattcacagcattacaataaataataaataattaaaatattacctgatatttggcaaacaatccctctctaagtcactacttccagcctatgttcaggctagaaatgccaaataaaaaagcacatgtctgtctgggcacggtggctcacgcctgtaatcccagcactttgggaggccgaggcggggggatcacgaggtcaggagatcaagaccatcctggccaacatggtgaaaccctatctctactaaaaatacaaaacaaaaacaaaattagccgggcgtggtggcgggcgcccgtagtcccagctactcgggaggctgaggcgggagaatggcgtgaacccgggaggcggagcttgcagtgagccgagatcgcgccactgcactccagtctgggcgacagagcaagactccatctcaaaaaaaaaaaaaaaaaaaaaaatgggccaaggatctgaatagacatttctaaaaagcaaatgtacaaacaaacaaaacaaaacaaaacaaaagcacaagtccacaactacatagctccagtttccctaaacagatttacccattcagtaaacattacatgtacaaagaacttaaaatagtatgagatttaatgttaagaaataaaatgtaggatctaaaacgtaatctatagcataatctcaaaaatggtttagaaatgacataataatacagacatttgtgggtggtaggattatgcatatttttatatatttttaaatatatttttcaaaagcttcctataaagaatgtaattctttcccaattccaaatctagcttaaacataattttacaaaaattattctctcagaatgtaaactagtaccacctctatggaaaacattatggagatttcctaaagagttaaaagtagatctaccatttgatccagcaatcttaatactgggtatctacccggaggaaaagaagtcattgtatgaaaaagacacttgtacacatatgtttacaggaccacaattcacaaatgcaaagatgcagaaccaacctaagtggccactgactaatgagaggataaagaagatgtggcatatatatatcagggactactactcagccattacaaggaacaaaataatgtcttttgcaacaacttggatagagctggaggccattattctaagtaaagtaattcaggaattggaaaaccaaaaaccgtatgttctctcttataagtgggaactaagttaggaataagcaaaggcacacagagggacatattggactttagagactcacgaggaggagggtaataggggactagggattaaaagaaaaactagacattaggtacaaggtaccctacttaagtgcactaaaatctcagaattcaccactacgtaattcaactaagtaacaagaaaccacttgtaccccaaaagctactgaaataaaaattattctctcaaaaattttaagccctaaacttcagttcctattgtttatatttactaagaaaaacaacagaaaacactgttttaaaaatggtggatttttttaaggttaaaggtatataagacagctgcctaaggaaacgcagatacccctgtaccttgttgttgttgttgtttttcacttttttaaaaaacatagagatgggatctccttatgctgcccaggcttgtctcaaactcctgagctcaagcaatcctctgacctcagactctcaaagttttgggactacaggcgacagtcaccatgccagccaatatccttgtacttttaactcattcctacaagccatgaatcctctaagcattgtcccagacacagcactggcaaacttcaatcgttttcatcagaatataaagaaacacagggcatgcttaacttcaaggttgatatttcctttgtgagtaaagccttgccacagatgagaagtcctgaggatcaaacaggaaaactttaagtttaattaaatctaaaatcataaaacctaagttatatgactaagcaaactcttcaaagcactcagtcaacatccatgctggtaaatatttcaggaatgaaatgaaaaataactttcaattctaaaagttcatccatcatgcatgcttcacgttgtaaagcaaatatttcacaaaaatgagtttacaacaaaagaacaccaatcccacttctccaaccctccatgtcaggcagtaagctttccacatttgcttacattctgaaaataactattttacatgccaggaatgcaataggcttaagctgtcaaaaagtatcatactttaagtgtaactgggtaagaactatgggcacacacacaataagccttccaaaacaaggggaggtaaatgaaatcttaatacctgtgtttccagaagcccagaaatgaagtgcaattccttataatctgtacatgtttacatacccatacagacaataaaatgtgtaaggtaatgacaggtccatctctccccttccttttagtgggcatctgacatttcagggttcagaatcacatatcctgggtcccaaaaggtccccccattcctattccaacagtgctcacaatagaaaaagatgaactgatcactggaccctacatcatctcatatatgtataatactagtccacagagaggttgaagatatgcctggtaactctattcatcctaccccacaagttttgtccaaatcaggccatgccttcaagtgggccagattgtcttaaagctcctggcttaatatttaactgatagcaacaacctaacgttagtaccttagtaactaaaggggatgcagcaacatgaagcagaaaaagtgatgaagaaagagattagaagttagagaacagggactgggctcttgatccttaaaatgtgggtgattttgaacaactcaacatctccagatattactttcttcatctgtaaagtggagaagcttaaaaaggaggtcttatagattctacctgttccagaaactatgattctcttcctagacagctgcaggttgaagagactctcctagagctgcactgtccaatacagtaaccactagccatctgtggctactaagtacttgacatgcagctggtctgaattaaaatatgtgaaatatgtaatcaggtgcggtggctcacaactgtaatcccggcactttgggaggccaaagcggcaagtcacttgaggtcaggagttcaagaccagcctggccaacatggtgaaatctcatccctaccaaaaataaaaaaattagctgggtgtgatggcacacgcctgtaatcccagctactcaggaggctgaggcaggaaaactgcttgaacccaggaggtggaggttgcaatgagccaagattgcaatgagcaagctagattgcactctagcctgggcaaccgactgagtgagactccgtctcaaaaaaatagtaataataaaataaaaaataaatatgtgaaatgtgaacattttgaagacataatatgaaaaaataatgtatttcataaatagcttttatattgaccccctgttgaaataacattttgaatttagtgacagactaaaattaatttcgcctgcttatttttttatgtggctacttgaaaactttaaattagatctaacggtcctattatacctctactggataattctgctttaaagtcagtcctgggcatgcatgacgcccagaggaattcacagataaaatgagcccaggaatctgtatggaatacagacctgtaggttaccatttccatattaaatgtgtaaagggctgttttaaaaccatgcttttgttttcttattttgtgcaccaacaataaatcaacagcaaatatcattgggtctaaaaataattgatatctggctgggcgcggtggctcatgcctgtaatcccagcactttgggaggccgagacgggtggatcatgaggtcaggagatcaagaccatcctggctaacatggtgaaaccctgtctctaccaaaaatacaaaaaaacgtagctgggagtggtggcggaagcctgtagtcccagctactcgggaggctgagggaggagaatggcgtgaacccaggagggaggcagagcttgcagtgagccgagaccgtgccactgcactccagcctggacaacagagcgagacttcgtctcaaaaaaaaaaaaaaaaaaaaagataccacttcatttatgctatgcctgaatcctaattatcaactgtaggccttaacaataatcctaagtggatgtgcctttatgcaggcacttgtggcctttttgttttctttgaattaaatatacaaagtaataatttatcttacttcataaaaagattataatctcccattttttaaaacacatttgatattagtaggaataactaaaatgaactcgtatgaatagaccatttttatttcattgatatctaactaggaacgttgcaactaatttttgcaatctgtatcaatttgtttaatatattttaaatgaacaaagaagcagagatagtttctagagagcttatttacttaaaaatacaacagatattaatcaataaaatattaataagattcaggtgagtcgagagtgagtactcaagttctcttttctcacaacgtattcttggagtgccaaccttttcagttcaatgattttatgcaaaggtatacatctaactgcctgcaaaataaactactgactattttaaatcagataaagcaaacaacagcccccagctctgcaatccaaagccagcaaaggtcacccatttcagactgggtttgaagcatagccagttatgatagctcaaatattttcagatgtatgaaagcagaacagaattcagaaatatacattctttggcagacaatttttttagaaccaagtttctcaaattatataatacaaactatatgactattagaaaattatgcatgaattaaaggagatttatttaattttcaaattctaatataattaaaattttcaaacttaactatatgggcttcacgggtgaaaaaaagtataatttaaaaatatgagcaatataatatgacagaaatatacattcaaacactctttctaatttttcataaattaacaactatttgagacatgcacaaattttcatgtgtttttctgaaggtggtatccagaagtgataattttcctgacagtttaacattttttaaagacatgccaagatttaaataatgtagctttttgattactctttttttttgagacagagtctggctctgttgcccaggctggaatgcagtggtatgatctcggctcactgcaacctccgcctcctgggttcaagggattctcctgtctcagcctcccgagtaactgagactacaggcatgcaccaccacgctcggctgatttttgtattttttgtagagacggggtttcaccatgttggccaggctggccttgaactcctgacctcaagtgatccacccacctcagtctcccgaagtgctgggattacaggtgtgagccaccgtgcccggcctttttgattactcttaaaactgcgggatcaaaatgaaatgttagaaagtaaaaccaacagcagaaagtaaaaccaagagcagcttctgaggaatcatattttagacatttctttcagacagattctgtaatgtgtcaaactattggaacatatttcaactaaatatttaagtgaagacaaaatccctactacaaaacctccaaatactctaacaatgatgattctatcaggcctactcagaactacaggttttccccacatcttgatttcaaagcatactttctgtgacgtatcttcatttaatcacttttagaataattgaacaagaaaataggtaaggaattaaaataaattttaaaatggcagtcccattcttactgacataaatttattaagatcaatgttcctttttgcatagatcttcccattctgtttcaataacaccagcaagcataaacagatttgaaaagctacgcagccacagaaaacaggttcagcatgacagacagatctagctcaaaagaggtgctcagtgtcaagctcttttctaaaaacctcaaagcttgttttgtctgctgttgctttcaaagaacaagcacaacaaaattgttttgaggaagtctctagatcaaacgaaagacagttaaccaacagggagagtaaactgactgccactgctgtccacacagggccacagaaatcattgctttgttccatcactctagctggaaggccttcccaggaatgcaagtctgaaccatctagagttctctcagccagaatgaaggctcagctcttggatgtttctaccataaaaatgagaaagcatttcctacctcctcctctgtcactccacaaagatgtgcttcctgtgtggctggctagcagataagagaaggtaagcaaatcccaaaagcctactctaatcgctcacggagaatcttagctttggttcagaacgttaagtctacccattttcctctatccctttatggtactgtatttcttctacatcccagaatgccagttgccactcaatatcctacctctcctttacccttaagaagagagccggaaatgtaatttctgatagcaatgctcccagctaatagagcacatttacatgctcccttgcatcgaggtgtcactatctggcccatgagattaagcagaccttgaaaaggacttctacaaaagctcctaaacctaactgaaccatgaatatcaatgcctcgtccccattttaggaacatttaaaagtactccatttctaagaaaatgaagttcaaactcattaagggcatccaaaatttataatttcacactgtctccttcacttattatacccctgggcttccccctttgaaactctacaccctcgctgttttttctgtctgggaagccctccccaccccagttcaccttcacacatccttgaaacctagttcaaattctgcctgccttctctgggaagagtttgtacctcctctattatagcctttggcacactgtacctaattatttctccgtctctttcttcctccactggactgcggaattcctcaaggcacagactgagttacctttctatttactcacagccccacccagattctagatctcctgtcataactgaaacacagaatccatgcagtatgtccataaaatgaataataatttcacaaattcaaaatgagagaaacaataagatagtaaattttttttttttttgagacggagtctcgctctgttgcctaggctggagtgcagtggcacgatggctcactgcaagctctgcctcccaggttcacaccattctcctgcctcagcctcccgagtagctgggactacaggtgcctgtcaccacgcccggttaatttgttgtatttttagtggagacagggtttcaccatgttagccaggatggactggatctcctgacctcgtgatccacccgccttggcctcccaaagtgctgggattacaggtgtaagccaccgcaccaggccataaattagtaattttttaaacatctaactccaaataaatgtcaacatcacagaagtcaatcacaaatgccctgagaaaacttgcagtagagacataaaaggggaatgcacaatccaaatattcagctaaacattctgcattaaaccttccccctcatctgcacacagaagaatcacgggcttaggcttggctttgtgttcaacctctgatagaaatgagcaaacgagcaatgaagtcaacatgtcagattgctttgtaaatctaaataacttcgcatgtgataataaattctaagaatgcatccaatgtctttttctctgcaacaacaagacactaatatttttttctcatctcatcggctatttattaaatcaataaatacaattaaaaacacatgcgcataagaaatactctcaataaactgaagggatgcttcccatctgtgtccctacaatatgacccagaaaattcacaatgatataaatttaacctttgagtctagctcacaaaagtgaagtgaaatatccaaatagcaaatacgaagaaaggaactaccaagaaacaaggaaagtcagcctccaattttgttcatttaagtataccctctctgccaccacaacattcattatgtttgtcctggacagctctaatggccatgctgattgatactcagtgttaaggccacctctgtccaacagacagaggtggcttctactctgtttcagccaaatactcacatggctactctatcatcacctggaaatctcccagcttccctcaggaattcccccctctcctatttcactgaacaagcaggaataagtgattccaaaattgcaattttgtctcaaatgtactcttaaaagtgaaaccctccacaattcaactagcagcagttctgtaagctgcctttacattcaaacaccctatgggttagccaagaacgcccctccacaacaaccatagaatttttatattcgttttacttctgttgcatttaaattttctggattctgtggtataagaggatttaacacttgacacaaaacattcaaaataagattgagaaaatactagcaagatacaaggctaatcataatgacctcaattagattttcaattcctgtcaagttaatggtatatagtagtattggcttcaagctcttcaaattgaaaaatacaattcttttagataacagaggtaatagaattcaatatatttttttaaagggccaattttgatccttgtcacactaaacactagctgtaaaatggccaaaaaaggagccaaaaaaaaagacaatgacagagaaattttcattttcatgccactaaatttaattccaatacacattttctttccaaactctactaacttcttcacacaaaattatgtctaggcaccctctattgaaagtgtcccaatcaatcagggcatggatgaaatatttcaaaaatgaggcattttttctttttgcaggccaactgaatttttgaaatacaattgcaaatgactgaacgtgatgtattgacagtatttatgaaaccttttcacaataaaatgttccaaaaagaggctgaaaaaaaagaatcttatttaaaaggctttaatcttctttctatgcttgttcgcagtttcttaaatgttgagaaggttgcacagctgttcgaatcttcaatctgaacgtaattctttatcaccacaacatagaatttctagagaactcatttatttagtacatacaaaatgtaaggcattatcatgagtgatcaaacaaattactgtatagaaaagtgtgtgatcacaatcaacactaacttctctctcccaccacttgttttcaacatttaatcacccaaagtagatcttctgtctacaattattcttttacaatgtagtaaatatatagttccttcccccagttatctaagtttaccttcacatactgaaatgatcagagaactttgacaatactacagaaactattgcattcacaacacacatccttctacgtagcattctcttatattccttacccaacttaattttttccaagtcacttccttcctcctttttattctgtctaccctcttgggggcaaggacctcgaaaatatttgtgaaatgaaggagtggccctttcttggttgtacccctaagaatctaggtttctttgtgtatgaaaataagctaatttccacagaaatttggctttaattttaaattgctaatcaatttaatatgtaagtatctatgattaattattcttagaataattagtctgcatattttcacatttctatgggagtttcttaggtactcttcagttatatcctcaaactaatttactgtaatgacaaaattatatttgtgttaaaccataataagcaattgagagcatcaggatggagaatatttgctactacatatcacttttcatatgatgggttttaatgttagtctctgaagacttaagctaagacttcaaaaactttgcatcggttttaaaggcttaatctttgaagtagatgaggattttttttttgaaagataaaaaaatcaataaatacagttaagaaacagtgcttatccatctttattctatgagcctatcaattcaattataaacaaaataactgagtaatgatatttataaaaacaacattggccaggcacaatagctcacacctgtaatctagcactttggaaggtcgaggcaggaggatcgcttgagcccaggagttcaagatcagcctgggcaacatagtggggaccccatctctacaaaacatttaagaaattagtcagatgtggtggcacatgcctgtagtcccagctactctggaggctggggcaggaagatggcttcagcccaggaggccacggctacagatcacaccactgcacttcagcctgggtgacagagtgaggacttgtcccgaaaacaaacaaaaccaaacacagtatcaatatgcttttgaaaattcatccaatagtaggagtagatataacaagtccttttttaagatgaataaacctttaatggataaagccattttctttactttctcttaaaaataaaatttatgttgcctcactaattttactgtgaaataacgagcacacagacaaggaaaaactaaacaaatgagtttgtagtaacttgggatgaggggcaggtctaaaacacgttaagtctatctcaacagtaggattaaacctctcatttttcttcctgtaaaatatctccagggggtcaaaatatattagttattcaatgtttgaaatttagcaaagcagcaagagtaataatgcatttcttcacttaacacaaatgacttttctttatgcaacagatctcttattctcataagtatcttttatggctgaaaagtaatttatcagtctgtatcatctaggatgccttacatttttcaatgaagacagtatgtggctttctggaagctaatgaaagccaaattattaaataagagacaaattattagattctctcaaaaaaagcatcaggcaaaaaaaaaaattcctatcaaaatcaccaaaaaattggccaggtgcagtggctcacacctgttatcccagcactttgggaggcctaggtgggtggatcacttgaagtcaggagttcgagaccaccctggccaatgtagtgaaaccctgtctctactaaaaaaaaaaaaaacaaaaacaaaaattagccaggcgtggtggcacatgcctgtaaacccagctattcaggaggctgaggcatgagaattgcttgaacccgggaggcagaggttgcagtaagccaagacacgccactgcactccagcctgggtgacacagtaaaactcagtctcaaaaaaaaaaaaaaaaaaaaaaaaaaaaatcaccaaaaaacaaaagaagtgacaattattcttgttgaatcaaatttctcataagaaaaccttctgactttgtgaagaaaaaaaggaaccatctggaaattaagagattcaaacactgtttggggtccatcattaataagaccttaaggaatcactgcacttcattcatcaggatccattaatttacaaaacaggcttattcatcttttcccttttccaaaatgtttgtcctatttattcctcatccctgctcatgaaccctccactcctgcttctggaaccatcttaatcactcctcactgtatctactgtaatcaggatgtttatcacaaatatggcttctgtcattacacatcctcgtatgtgaacccacttcttgtcttcttgtctttagttggacaggacaattataattacatgagctggttaacaaaaacccatgtgaattctttgggactctgcttcttgatttttccctgcgttcatcatcatttaaccacagtatcaccagtttcatacactcaaggctttcaaatatccttggcctgcttttgaagctaaaaaccttttatttttgagcaacatatgctgatttttaaaaaaaatatataatttcaattaaacagcagatcactataaagttttaaagatgtaacagccataacatggctggttacacaaattcactttactgcagctgggcgcggtggctcacgcctgtaatcgcagcactttgggaggccgaggcaggcggatcacgaggtcaagagtttgagaccagcctgaccaacatagtgaaaccccgtctctactaaaaatataaaaattagctgggcatagtggcacacgcctgtaatcccagctactcgggaggctgaggcaggagaatcgcttgaacctgagaggcggagattgcagtgagctgagatcgcaccactgcattccagcttgggcgacagggcgagactccgtctcaaaaacaaaacaaaacaaaaaattcattttattttgaaactgatttcctagagaaatgccgcattctcaagcaatctgctttttggtttccctgtccttgggtgaacataacttcaagcttccatattaggaccaaaattcttttgctggcatttgaaatcttccatttctacccagattggcaaagcctgtttattcgttttgctagcaaagattctactgaaaactaaaccaagtctgttcacagttccttgcacatagctgatagccaactaatagttaataatcaagccagtgtataaacttgctcaatattagacatctgtggcaagctgccagtgtgtacaacattaaaaaataggtctctgggaggccgaggtgggcagatcacttgaggtcaggagtttgagaccagcctggccaacatggtgaaaccccatctctacttaaaaaatacaaaaattagctgggcatggtggcgagtgcccatagtcccagctactcaggaggctgaggcaggagaatcgcttgaacccaggaggcggaggttgcagtgagccgagatcgcgccactgcactccagcctgggtgacagagggagattctgtctcaaaaaaaaaaaaaaaaggtctacatccatgttatgtggaaaaaaagaaaaaaaaaaactaggtatttcccatttgtgtaaaaaatgcttatgctttttgcacatttctgtactgttttaaatttttcaatgagcatgaattattttcatttttcaaaaaaccaattgaaatacacaatacatatttaataaatgaaattttataacatgtattctaaaaattgtatctgagataccatgtgctttttaaatttagatcaaactcatagacaacaatctgtcaatttcctgcaatagtcttaattggccaataagtaatttgtcaataagtgaaacatcatctagatttttaactttcaactatgcaggaaacttacatatacccattgtacatcaacatcatcaccatacatagcagcaactaacacacagtgcttatgctatgccatcaggttacatatatattaactcacacactgtttcaagcatttaacaaagatattaattcgatcctcaataactagaagtactcatcccattttacaaaggaaaaaactgaggcacagaaacttgcccatggtcactagctcaaaagaaacaaagacagaatttatgcccatgcattcctgccctggtctaaactctcctgattagtgtgcaatgctgccttctctacatacctgagaaacactcaatgactcagtgttattggcctaacatcacgcctggcatcaaattcaacattataaattgagaacaactctggttcgttctacagaggtgacatttttaaaaacctctcatcttccccattttaactatcttctttcgtaagatactgtgagtctcgcaaggttcaagctaaatctctattgcatgtttcttcaacatgtagccacacaaaataaacctaaataaaatgatctcttaggtttctatttcagcagatttaatacatgtgaacctgagacttctgtggccctctctgaatactcagctagctaatctactaagcatccctgtttcataaagctattaattgatgcacatatccaggcttttaaatttaaatatgtgaatttattcctagagcaatcattgtactccagtttttgccagatttctacttctgaagaggtaccactcaagcataataataatctataaccaagattaatctaaagaggaaaatttgccaaacttttttttccaagaaaaatactagtgtcctcacagtaatgattatttcttaagccatccacactaaactgaaaaaatagttacataacatttccccctttactaagcttttcacttgcaaaatcagcttcagggtttgagttctgtctgcttttcttcttatacaacaataaaaaaagaaatacatattttattgattaaacttgctactcattctggggtgtgctcattccttcccctgccaccttctgtcttctgtgtacagatgagggtgttatctgtacactggctgtgagacccacagggtgacagcgtttccaagggtttgcaaaagacggcatttcccatccatccccactccatacatttgcatctgagctctcactatgaaaaggaaaagatttttttatttctgttttcttcagcccttttctgtctacaaagccaatctcctctgttcaactcatcggaacatttatactattttacagaatagtgttgcctgaatgtagaatcacaacaaagccagttgagatctttaaattaaaaaaagaaaaaaaaaagatttcataatcaagcatagtcaagtgaaacagagagaggttgaaaaccaccagacaaaaacaaaacacaaacagaaaatgtgatttttccctatcctcctcgttgccactgttcatctcatactctgcccatcaagatgctactgaagctctctggtcctgcattcagccccttacctttgacctctcaactccttatttcaaattccctactcctgttgagaataccctgcaccagcatctgtcactcaagtgagagagagagagagagagagagagagagagagaaagagagagaaagagacagagggtgtgtgtgtgtgtgtgtgtgtgtgtctgtctgtctgtctggtagaggcagagaggaatgtaaacaaatattgtatatgcagaaacttaacctccaatccccagacctgggatataaacctggctggaaatttactaccaggaaatgctccaggattatctatgatctcatcccattgttccttactttttaaatacaggaagttttctctgtaacatatttactcagtatacctaatctgtattttccttttggtattttagtacattccactttgttttattatcatgtgcatgttttatttaccctgcaaacttcctgggagtaaggggagggaggagggaaggggaggtaatgaggtatgcagtcgaactaaaccttacattctggaagctttaaatttaaaatgcatctgtacaggtttatctttacatttgtaattgatagagattttaaaagaaatgtattaatgaaagatgctttgtaagattctcaaggtaatacaatttgcagaaacaatgtacatttctactgaatttaatgcacttctcactgatagtttagtggccacgtgaaatgcaagtaatagctatgcttatttccagaatgactgacaacattcatacaaatatctgtagaagactctagtatgcaaaaaacagtaacataaaatagagatcctctagcaacaagacttaacataaagacaacctctcccattccttcaaaccaatattgttgatcacgttatttctttttaatttttttgaatcagccattcctcatttaacctcgtgaacttgcatgttccttttcatttcctcagtcaggaccagtattattccatctagtaacttctccgcagtactaatagccttgcaaatgtcgttcaggagcctctgctggttccggtgacaagagaaaagcttctgcagtctgccagttatcatggtttctcatcgattagcaagaaccgtgactccttacagatcaccatcaaacctgagctttactattctgtgtgtcggcttctacctttagcgaggtactagtcagtagcagcaggtttccataaactataaattagcactaccacaaaggtaagatgattgtgactaggttaaaccctcaacagagggaaataaaacttaagaggaagctagatttaaaaataaataaataaataaatattagggtagtgaaacatcatatagattagggtttgttaaactcacacctctatcaacataccagccaaaatcatcaacccagataataaccatgtttcccccgatagccaaggccccattatcattgcccttattcatttcttttctacagccacctgcagcagacctattttctaagctctataaaagacagtcaactcgtaattacatcttttcagtggacacagagagaaccagataaaccaccctcaaacctcagtagactgaattacctacccttctaccaacacttcgcaaaatggcataatgtgaatctcacctccaccctttaaaggagttaacaatagctactgaaaaggtcccaaaagatggcagaaagagcatattaatgcaattaaacagaccaaaaactaaattcgaatctgcctacatgcttcctctttttatacagaaagaaatattgctcaacaaagttacatatttaagttttgacaaaagcttcaaaaatacggttatcatatgcttttaattccttaaatgtatggtttttaatctgtagtaagaccattcgggaaaactggaataattctacaaataaatgtaagtaagtcatgagagaaatcagaattctcttagttaagtgcatttttttaaaacatggaaaacgaaattctttaactcttaaaacaacctgtcttaactagccctaaggtgattcctgagccacttgtgggtaaaaatcagaagagaaaaaagttcaatgaccttgcaaattagaaactaaaaaactaatggtgtgatagtctgtacagcctcagtggaattacaggaaaacatctgcccggaaattgctttttttcttttggaaaattactaggaggctgggggaaaagaggggaaaaacgggtaaggaaggttgcaaatgttaagatgccaaacaggaacccaaccgaagtccgaagtgaaatacagcctcctctggcccaactgtcatgcaaacaacttctaagcatcttcagatgtaaagaaaaacagtcattgtgcacaggcgttagctgaatgttcgagagttggatgaatggggaagacttgttatacacctagtggtgggtggatttcactaggctgcagcctccacacagcttttctttgctgcactgcagaggcgccatcttctccgtcttaatcttcactcaattcgatccttttatctgcaccctaaaaaaaagacccttcggaccctccccagcatcctgtgcccccaggggaactaaaccagagtccccagagctgccagggaagaggccgcgccttaatcagacaaacgcctccttggatgcacaggacagagcccgtgcctccccaccatccgccactgccctttccagacgcacatcccactctccgccttatttcctccccgccaaggactttacagcccagcacagaattaagcctcggaggtgatccgagggtgggaagcagaggggccccgaggctccgccagaagccccggcagcgtctctgccccctcccaggcggacgcgcagccccgggaagggagccgggcgggagcctcggtggcgcactgagactaacgcggctcggcccacggcgagggcggggtgtcgcggcttttgttcccgcggaccttctgcctctcagacagagcttagggtgcgagcgaactcccgggacgtccagacttggggaaggcgcggggtggctatgggtctccgacccctcccatttctcgcaagttacacaaaagggagacgcggacatgcacaaagtttgcctgtggaaggcggtgcgcgaccccgacgccggctcgggctagggtcgcacccaggctgccgccgccagcagccgcgaaaagaggttggagcaaggaagggggatgggggtgagagaggaaggtgaaacgaggcggagaacgcagggaaaagcgaggggctcctagcttcctgggctgtcccgactcctcctcctcctccccagggcccaagagaaaggaaagggcaacgattcaagagcgaaggactggctttagggacgctgcgttttcggttttccccacgtgctccttcccccttcccccctgtctgaatgtctctcgcctcccccgacccccgcttccaaggcagggactaagtcggggtctgggctcagggtcgccccctacccttctcgccccgggctggcgcggaaccagggagaccagcgcctcgcccgctccctctcagcgggccggagcgcgactccctggggcagggctgggccgaaagcggggatgcgctggacgtccgcaagcgggggcggagaggagaggggtcccattgacggacccccggcttctctgcattaaagacttgggttaaggtcttggggggtatcgcgtccccaccgtgcagcctccccccgccttccgaggcgcggcacccacctccagcgcccgagccgtccaggcggccagcaggagcagtgccaaaccgggcagcatcgcgaccctgcgcggggcaccgagtgcgctgctgtgcgagtgggatccgccgcgtccttgctctgcccgcgccgccaccgccgccgtctcccggggcccccgcgcacgctcctccgcgtgctctcgcctaccgctgccgaggaaactgacggagcccgagcgcggcggcggggctcagagccaggcgagtcagctgatccggcccaccccgctcggcacccgagagagacccctagcggcgccgccggggaactgcgcccgctcgcgccgggaggggccctcgcgccccgcgcccacaggtgcacgcgcccttggcgccgcctgcaccccacgcgccccctccgctccccggccgacggcccacctgggcttcgtgaacagtgggagggagagtctggggccaggagagggacggtgcaggatcagggaaaggtgagtcctaggacgctgaggctctagaaaagtcgagagcgctcctgctcgtccccgtgagcttgaatcatccgaccccgcaggcctcccgggggtgtcgtataaaggactgctgctagggtgcgtttttatccgcatttcgttttttctctcggtttggagaggtggggcaggcgtttctggaagagaatgagaacgagtgaagcttaaaggaaataggattttctttgcttgttgagacagcaaaacctcattttttaacccccaacgtcaaaagcaggcacgagcaacctggaatttctatctttagaacgaaccaaaggagcaaggcgcaggacctggcaaagaagcggccaacccatttacttcttcttgaaagcagggttctgggcttgggttttgtttctttcttatatttttgtttgtttttggttttgttttgttaaagggggtggtcagtgtggattttgcggggcggggggtctttttttgttgttaagcagggatgtaacatccatctgagttggggaagaaggaaaaattaggagagatcattcgtattcgacccccgtaaatgaggacttctgacctcaaacgctgcccttgttcttcattgtgtctgtcctgaattatagaaatgaaccttctgccatgccactttctcctggattaaacacaaaccgtccactgtccagttagtgtccagatagtttagaatgctctagaactgcccagatatatcccctgctcttgacctgaagtagcatttagttaccaagccacagcccactccacacagggcttggagcgaaggactgaagccagggagtgctctggcccttctgagggctgcactgcagcctgccttctctcccttgctcattgcgctgacaagggtgcctaggcccgggaaggatggctcagccagcggggtacagacttccttcctgggaagtcatttctgtaccagctcccctaaatgttgtcttgtgtgtcttttcccgcactaggcattcagtcttgactcttggattacttttgcccctgaatgtcctttggatgtcctcaacaaataaggacaaatatttattgtcatgcagtatttgtttatacgcttcatgtcatttacttcctacaaaagccaaagaggctgttactattattcctatttatacatcaggaaaatgaagctaatgaactcccaaatctaatagcaagtaagtgacatgaagctgggacagcagggaaaagcctaaagtgacaggacaaacccagttgttcactttctgcaccacatttacccaccgcaattccgtatttgttccgggtctgcatgagcaaataaggcaaaaaagaaggtatctgaatgcaaagagaaacgtggtccaaagctacaaatcttgcagagtccactgcaaaatgcaaacgtgagaccctttgttacattattaagaattttaaggccgggcctggtggctcatgcctgtaatcccagcactttaggaggcccaggtgggcagatcacctgaggtcaggagttctagaccagcctggccaacatggtgaaacccccatctctactaaaaatgcaaaaattagccgagcgtggttactcctgcctgtaatcccagctactccagaggctgaggcaggagaatcgcttgaacctgggaggcggaggttgcagtgagccaagattgtgccattgcactccagcctgggcgacagagcgagactccacctcaaaaaaaagaaaaaaaattaaattaagaattttaagatggcaatggcagagcgttaaaccaagcatggggctcctcccaccgcagggcctgtgagactctccagggttgcatgcccatgaagccagccctgggaaggaggaggcaactttaagagtgagggacttttctttgggaggctgaggcgggcggatcacgaggtcaggagatcaacaccatcctggctaacacggtgaaaccccgtctctactaaaaatacaaaaaattagccgggcgtcgtggcgggcgcctgtagtcccagctactggggaggctgaggcaggagaatggcgtgaacccgggaggctgagcttgaagtgagccgagatcgcgccactgcactccagcctgggcgacagagcgagactccgtctcaaaaaaaaaaaaagagagtaaggaacttttattgagcatgaaattcaaaattgtagagatgagatcataatctataaaaattaaagttcttagatttagcagtttctctttccactgttgaaattcaccacactgacacattccctggtcaagatgttcctgggggaagatgattatgctgctgattgcgtcagaatgatggacattgcctgcatgttctctggttccttcactactcagagatcctgatggctttttgcttttcagccactagctctgttctgcatttaatgccatttcctgccctgaggtgtcttgcagatcctccaagcagaaaacgcaggaacatccctagttataaccctacaaagttggggaaggaaccaacaaccacttgtctgctggaattcctacaacagcatccccatcctagtttcaagtgtctccatttgtgagatattcactggctctccagactgtgcattctatctttgggcatttctggttactagaatgttcttatcccatttaaagctcacatcccccgcctttaaactcccactcagatatccttgtatccccagtgaccaagcagaataattcttttccacacttcagatctttacaaatttgccagcggttttcatgctacttcttcctctagagtcttctcttcacaaggtaaaacaggcacttccttcaacagttgcataatggcatggtttctggttccttccacaccttggccattctctaaatgtgttctggcttgtctgtgtctttttacagtactcgaagtgtgctctgactgctgcaacatgggagatgttgcccactactctgcctggagcctcatgttgcatttgactgttttagtaaccgcatcccactgcagactccaattggtccagataccccatttctattttatgcatagtctgctgggccgcgtttctgtcgtcttgtgtttaggctgttatctgtgccctataaatatcaccaaaagcaatcgttaagtctgagccagatgaaccctgcaggggtgccataacttaccatagactggatggatcaaacaccagaaatgtatttcctcacatttcaggaggctggaagtctgaaatcgaggtgttggctgagttggttacttctgaggcctctctccttggcttgcagatggccaccttctccctgtattctcacatggtcttccctctgtgtcttactgtgccctaatctcctcttgttataaggacagcagatattgggttaggatccatgctaatgacctcatttaaccttaattacatctttgaccctatctccaaatatggtcacattttgagacactgtcgggttaggacttcaacatatgaatttgggggtgggggtacataatatgtccttctttagaacagctaagacttattctataatcctgtcactcatctttggcctttatttccagtgacctttctttcattttcagtctgaagatcattcaactcaacagaaaaaaaaaaaatagaaatggaagagatctactttctgtctgtcctgcatcagcattgcatcatgatccccatgcagctggcttacccctcccgcaatcatcaggctctgaaaagaaagaaaatgaccttttatactttcctttagaaaattttgtcaaagcttaaacattgacatttaatgacatttaaaatctgtattagtttactagagctgccataacaaaatatcacagactgggtggcttaaaccaagaaatttattttctcacagttccagaaaagtctaagatcaagatgcagataggattggaatcctcagaggtctccttggcttgcagatggctgcacccttgctaagtcctcacacgttctttcctctgcacaggtacctctggtatttctgtgtgtcctaatctcctcctcttacaagaataccagccagattatattagggcccacgccagtggccttaatttaattagctcttcaaaggccctacccaaatacagtcatgttctaaggtactgggggttagggcttcaacatatgaattttgggggaacataagtctataaccaaacctctaaaattcccctaaaattattctcacattttaagctactctgatgtccgtccttgggagtggattccttctactttttattcatgtccttttgaaatcagaaaccttcctaggtaattagaatatttctttagctgcttcctggttgaatatatggattacttagccactccagacttccggtagtgttgggaattaccatgctttccatgaagatgtgagcttgctgggtatcatgtacgttggcagacgcagtgacgtatttgagagtttcacatgcctcttaacctgtctttcctcccagaaccgtgtgctaactcctcatcaaagaccagaagtagatcctgaattgtattcattctcatctctttctacctcctccaagacagaaggacatgattaacttctttatctcaatgtcagccttcaatagctacaaaagtctaaactgtaaatagcgttgaagctttgcataataaaattcttttccccagtgatgggcagtttttcacatagtaacattcttttaatctttttttctttttaatgagtagacataaagaaatgcttaaataaataattatcaactaacttacctacatttaactacacatacctaacagacctgaatataggcagaggatgtgacattttacttacccttttattaaagttactgcttcatttattggtctttacttcactagtgcatccataaaatgtttacatttttttaaacaataaaatactcttgaaattagtccttctctgtaatcactacataaaactgctttagagacagccttcagatcaactaaattatattttacaaaatggcttaggtatttcagtagtaactctatggaacaacagaattcactgtttaaccagggaccaatattggcagctggcttccataacttgtttgaggaatgtagtaattccaaggttgctgcaaggactaatgtacaggaatattcctgtattttatggaataaaaaggaagaacgagaggagaaagaaatagatagtacataccaaccccagaggtagggagtatgaaaatcaatcaagtagccagaagatgtaatggagccatgtgggtcttacgtcagttctcttccttagagaactttggataatagggcaacaatatgctctggtggaaaagaactcaggccttgagaaagcctgagcactacagtttctgaagaatgctcctttcattaggtggtgtggtgatgaattgtaaaggcacccagcacagtgcctggtttaccatagaaatcggttcttttttcttgagagaacaacaattcgcaatagctgtcacttaagtgaccagcataatcctggctttgagcttgccaggggctgccagttagaacaatggctgtcaaccccgtgttatttatttagatttcctaagtaatgttttgctaataaaagctccaaatttgtgagtgatttactcttgttttatttatttaataaagtggcacgatttattaatttaattaattatttaattaattattagcagtggcacaatctcagctcactgcaacctctacctcctgggctcaagtgatccttcacctcagcctccagagtagctggggctacaggtgcgcactaccatgtccagctaatttgtgtactttttgtagagatggggtcttgccatgttatccaggttggtcttaaactcctgagctcgtgatccaccctccttgatctcctaaaatgcagggattataggcatgagccactgtgtctggttgatttattttaatttaaataaaagcaactcgaggttagcatcatatcaggctactctcagttgtattctagtatctctcttgagtgtgggagtaagggatggagctgtagctagtttgctgagaactggacaaaaccctgaccactccctagggcgtgtgcctaggatgtgaaagatatgcctcctgttttcagacggcacccgtgcttggaaaggctgcttgccagaggtgttgaaaggatgccactgggctggtcctgcacaatggaagaccacatcacatgctccaagagagtcactccccagagcagctgcaggaagccacagctctgtggcctgggatccttgccacactgaatattagtgatagacattggagccgaggggatcttatgcttcaaggcagctggatctcttttttactggtcaaatcatacctaaggattgtctttcgtgtcctagagactttgatgagtaattcaacttttaaaatccaagtgaaggctgtggctagagaagcatgagctaaacctaaaatgaatgggaacattacagtctaacaagccttgagaattcaggttcacattccctaaagaaacaacatcctgaatgatgaaacaaacacacaaaccaaccaacaatttgtgatgtgagataccaaaacagacacccctttatcacctaagatggactgtaaggttaaggaaacaaagttacctacagggttagggttcggggactggctggcatgaccaatttctcaatttctatggctctaaactccctaataataggaactatcagccccatcctgtgatttacaacccagaccactacaactctaattggaatgaggaccagccttacaaacattcttttctgataagcaattgcagaccttaagccagtgtcagccagtttattagaggctgtgcacaaactgtctttgggtcctgtagttcaccttttgatgtaaagagccaaattttacctcattttaacactaaaaccctgccccaaagtgtacatgggatgtcacatacatatttacccattgcacatgcactcagctcccctcataaatatgtatatcttttcctccaaacctgctgaatatgtatgactccactgtgtgaaacagaccctgtgaggcatgaaacccaactgtccttcctctcttttgaagagagaccacattcagcatacaccgaagactatgtcttccgggtttgcaaattgatattgccaataaagctctcctttctgttatttagccatcacgatggtcttttgaatgataaattcacaaaagcaccaaatcattcaatatacaacgttgtccctgagcaaacacccaactttatcccttaaataacatttttgtcccgtgtgtaatttattcagttaaatataactattagaaatgaaagtgttcagtattggtggatcaataaaaaatttttatattctcactttgggtgggaattaaaaaaaaactggttcatttgctcccattaaggagctaatgtttatatgagaaaaatatctgggcaagaaaaagaaaaggcacagtgaaaaaagtacatcagtaaatacaatttagtataaagtatttgtgcacatatatgtgaattcatcagaagaaaagtaaggatcaggcctggtggcttgtgcctataatcccagcattttgggaggccaaggcaggaggatcacttgagcctaggagttcaagaccagtttgggctcaaaatgagaccctgtctctacaaaaaataaaatatattttttaaaatttaaaaattttggccaggcatgatggctcacacctgtattctcagcactttgggaggtcgaggtgggtgggttacttgaggtcaggtgtggtggtaggcacctgtaatcccagcaactcaggaggctgaggcaggagaattgcttgaacctgggaagtggaggttgcagtgagccgagatcgtgtcactgcactccagcctgggcgacagagcaagactccgtctgaaaaaaaaaataaaataaattaaaaaaataaaaattttttaaaaagaaaatgagagttacagacctgtagcgttggaagggtgaataagggaccttcagaggaggttttttgtttttgttttttatcagggtatttgataacaaccattaagaaagaagaaaggaggatgttcgaaggagaaaccatgtaaatacatcaagagtgttcatgatgggggtggtaagtgggagttagctataggaagaggtttttttttttgtttttttttttttgagactgactcttgctctgtcacctgggctggagtgcggtggtttgatctccactcactgcagcctcccccgctgccccgggttcaagtgattctcctgactcagcctcccgagtagctgggattacaggcacgcaccaccaggtccggctaatttttgtattttttagtacagacagggcttcaccatgttggccaggctggtcttgaactcttgacctcaagtgatctgcctgcctcagctgcctaaagtgttggaattacaggcatgagccagcacaaccggccaggaagaggtcttaatgttagaagacctgaggaatttaggtcagatggaataggcagcagtgggcaattagtcactacagatttaccaatcatgatctgacattttaacatttctagaggcttgtccacggggaaagtatagggagattcagaggatgaaaaagttgagattgggaagagaaggaagaagaatgtgccagaggttccaggaatgaacatagatagggtctgtgaaaagtttgtgaaaaaatcacacaaggacatcttattactaataaggatgcctaaggattacagtatgtcaggctgaggacgtatacagacgggatctctgaatactcatgagttgtattgggttaacattgcatgtcacaaatgaagaggtgaaagagtaaggggaagagaaaggagggtttgtacccagttctgtctaacctggacacctttagtgacaatgctgaactgcaaaggagaaaaagtgatttgaaaactttttttttttttttttttgagacagagtctcagtcttgctgtcttgcccaggcttgagtacagtggcgtgatcttggctcacggcaacctccgcctccagaactcaagctatcctcctgcctcagcctcctgagtaggggtgggattgcaggcacacatacacctggctaattttttttttttttgtattttgtatttttagtagagataggggtttcatcatgttgcctaggctggtcttgaactcctggcctcaagtgatccacccgcctcagcctcccaaagtgctgtgattgcaggcatgagccactgcacctggcctgaaatctttttttttaaatgagggaaataataaatttaatgttcattttgtaggtggaaatcagaagtacatgcaataggaattaacttgaatatgatgcataaagtttgaagcaaaggtgagtgatagatgaacattggtgatgtaactccggaagttgtctgtcataactgatgacttatccccatcatatgtgctgaaaactactcagatgaagttaacaacctgatattacaaaataagcatatatattttgtgtttataagaacctaataatcatctggagacttagtacttggggggtgagctatagatagccctgtgtatcagggttttccaaacaaacagaaccaatgggatatatatagatatataaagacacttcttataggaattggctcaggagattataaaggccaagaagttccaatatgtgccccctgcaagccgaagaaccaggaaatccagtgtaattcttgcatgtgaagctgaagggctgaagagtgtctgctggtattgaaggctcaagaacctggagctctgaagtcaagggcaggagcagatgatggatgtcccagcttcagaagagagagcaaatttgccttcctccacctcttttatgattcctatgctcagttaattgaatgatgcccactcacattagtgaggatgggtttttgatacccagtctattgattcaaatgctaatctcttccagaaatactctcacagactctcccagaaataatattttaccagctgtctgggcatcccttaacccaggatgggctaagagacaagtggacacataaagttaaccaccataccctgtaaatatggtatgagaagggatcgagtcatatttcatatcaagattattttccaatgcatagatgccttggaataatacttcttataaaataatgagtaacattttctagcacaagttccaaactgtgtaccatggaaccctagctcggtcatatgttgctcggtattgcatgcatacccgaaaagaattctgtaatcaagtaactttgagaaataagaggttaaacaaaattaaacaaataccttcactttaaaatgcatacaattctttaagatgataatctgcattttgaattttaaagagggtaggtagcttcagtatgtagcatcactccctctccctatttcttttttcttttttttttttttgagacatagtctctctcttttccccaggcatgatctctgctcactgcaacctctgcctccagggatcaagcaattctcatgcctcagcctcctgagtggctgggattacaggtgtgtgccaccatacccggctaatttttttttttgtatttttagtagagatggggtttcaccatgttggccaggctggtcttgaactcctgacctcaagtgatccacccacctcagcctcacaaagtgctgggattacgtgcacacacacctagctaatttttgtattttagaagagacggggtttcaccatgttgactgatctcgaactcctgacctcaagtgatccacctgcctgggtcacccaaagtgctgggattacaggcatgagccaccgcgcctgcctggcacctctccccattccttgtttttgtttgctgcaccaactcctagtgttgcacaaagcatgctttagggaatgtggtttggaagcattcgaatcaaacccttgaatttttttagacccttgtagaagtgaaggtttatagtgtacatttttgtcaaagcagatgggttcttttcactgaaagttgttttcacacatgaccttgaaaataaattaataaaaaaaaagtagaaatattaggctgacagacattttaaagtagggcataagatgccataaaaagccttttgaaagtttaaaataggagttaaagtgtgtgttatatggaagataccagattagagtctttgaatatttattatataaatgtgcaagtatatgaccagcttcttcccagtttgggggagtaatgggacggcattcagttcacatttgagactgcttctctttaaattttcgtaagtgaaaaggaagaaggatcactaagtttacaaagacaagtctcggaataagactttcgttcactgtattgcctttaatcatctggtgggagggccctcaagaagtggccaaggccctatgaagattggtgaagagtttcaaggaggagaattgaaggagacagctatgggattaattttgagagatgcctttgctgaaatgtctcataaaatatacatggagagcaagggcacaaggagacagagaactctctcggccaaacaataaatcagaatttccatagtttttctctgttagtccttattgaaaaatttgtctactgctaatggtgtcaagtagccctgccagccctcattattgtaccaaaaagcaaaacgaggaaaaggtttagggagctaggtctaaaaggaatatcatttctgtttcccaacaattagtgaaaacagattctgttaccaaaatcttgcagaaccaagggtcctaatacccactttattctggtgagtttgtcagtcgataaaaaatactaacaggccaggttcttttctcagataaacagtaaaataacatggttataaacagaaaaaaaatggtgaaaacacaaatcttggtgtattaggccattcttgcattgccaaaaagaaatatctgagactaggtagtttataaagaaaagaggccgggtgcaatggctcacacctgtaatcccagcactttgggaagctgaggtggacagataaccttaggtcaggagttcgagaccagcctggccaacgtggtgaaacctcatctctactaaaaatacaaaaattagctgggtgtggtggcatgcacctgtaatcctagctactcaggaggctgaggcaggagaatcacttgagcctcagagcagagatagtgccactgccttccagcgtgggccacaggatgagactccatctcaaaaaaaaagagagagagatttaatcagcttatgattcttcaggctttgcaggaagcctgatgctggcatctgcttggcttctggtgaggcctcaggaaacttacaatcatgatggaaggtgaagggggagtagggatgtcacatgaccagaccgggaacaagagaaagcatggtgccacacacttttaaacagccagatctcatgagaagtcactcatcacaaggacagcaacaaacagatagtgctaaacgattcatgagtaatccacccccatgatccaatcacctcctaccaggtcccgcctccaatactagggattacaattccacatgagatttgggtggggataagtacacaaactatatcattctgccccagcccctctcaaatctcatgtccctctctcatttcaaaatacaatcatgccttcccaacagtcctccaaggtcttgacttgttccagcattaactcaaaagtccaaagtccaaattccaagtccaaagtctcatctgagactcatctctttccatctatgagcctgtaaaatcaaaacaagttatttacttccaagatataatgggagtaccagcactgggtaaacattcccattccaaaagggagaaatcagccaaaagaaaggggctatagtcttcatgcaatttcaaaacccagcagggcagtcattaaaccttaaagttccaaaataatttcctttgactccatgtcccacatccagggcacactggagcaaggggtgggctcccaaggctatcagcagctctgcctctgtggctttgcagctgggtacagccctcatggctgctctcacaggttgttgagtgccatggcttttctaggcacaaggtgtaagctgctggtagatctgccattctcaggcctagaaggcaggggcccccttctcacagctctgccaggtcatgccccattggggactctgtgtggggtctccagcctcacacttccccttgtcactgccctagtagaggttatctttggaggctctgcacctgcaacaagtttctgcctgggcacccaggctttcttgtacagcctctgaaatttaggttgaggctgccaagcattctttaatcttatattctgtgcacctacatacataacactgtgtggaagcctccaagtcttatggcttgcattctccaaagtggcagcccaaactgtacctgggtccctttgaaccgcagctggagctggagtggctgggatatggagagcagtgttccaaggctgtgcagggcagtggggccttgggcctagcccacaaaaccattctttcttcctaggtctctgggtctgtgatggaaggagctgctgcaaaggtctcttaaataccttcaaggccttttccccattttcttggatattaccatctggattctttttagttatgcaaatatctctagcaagtggtttgctctgcaacctgcttggattcttcccatgaaaatgggctcagcttttcaaccacatggccagcctgcaaattttccaaacttatacgctgtccttcccttttaaatatgagttccagctttaagtcacttctttgctcctatatctgagtcgggctgctagaagcagccaggttaattcctaaatgctttgctgcttagaaatttcttctgccagataccctaggtcatcactcacaagttcaaacttccacacacccctggggcatgaagagaatgcagccaagttctttgctaatgcatagcacatgtgatctttgctccaattcccaataagttcctcatttccatctgagaccttggcaggcctggacttcactattcatatttctgtcagcattttggtgacaaccatttaaccagtttctaagatattccaaacttttcctcatcttcctgtcttctgagctctccaaactcttccaacctctgcccagttccaaagttacttccatgttttcagatatctttatatcaatgcccccattactcagcactaattttctgtgttacatcgttcttgcattgctgtaaagaaatacctgagatgggtaatttgtaaagaaaagaggactatttccctcacacttctgcaggctttacatgaatcacagtgctggcatctgcttgacttctggtgaagcttcagggagttttcaatcatggtggaatgcaaaggggaagcacacacatcacctggtgaaagcatgtgatgagcaagagagagagagcggttgggggtgttgccacacacttttaatgagaccagatctcatgtgaactcagagggagatctcacttatcaccaagggagtggcccaaggcattcatgagggatccacctccatgattgaaacatctcccaccaggccccacctctaacactgggattatacctcaacatgagatttagacaggggcaaatatccaaactctaccacctggttttcaggtcattctagagcactagcagctaccctggcttaaatcctgaaaagtatcaaatttatgtgtttttgaccgacataagaaaacaggtcaaagatttgcttagtccattgtaccatttctgccttaactacttgggagctactgggaattttctatttttaaaatcaggttgtatcaagattgtttggtgtttttcttttttcttttcttttttttttttttttttttgagacggagtcttgctctgtcgcccaggctggagggcagtgacgcgatctccgcttgcggcaagccccacctcccgggttcacaccattctcctgagcgcctcagcctcccgagtagctgggactacaggcatccgccaccatgcctggctaattttttgtatttttagtagagacggggtttcactctgttagccaggatgatctcgatctcctgacctcgtgatccacccaccttggcctcccagagtggtgtgattacaggcgtgagccactgcgcctggccctgtttggtgcttttcgaccaaaatctctaaacaactccaaaagccataaacagactaagctagaaaaaggcagacaaagatattagaaactaagcttgagtaactcaagtctttaatgctgtcttactagtctcagtaattcagcacctaggaaacatccacagaagacattttatcaatcaaaacaaagaagctcgggcaagcacagtgatgtgtgctcactcatagatagacttgtttttgaaattagtcttcagtgatattcattcagtgtgagatttagtctccataaaccgaagcacaacacaacttgaagctttactggacccttgggagtgagaagcagttctgtaatgtgtctgtgattaagtagcagtttcatcctgatttttcaagctcagagctctctaccctttcacatgcttgaagacaagatgttggacaactggcccagaggatgttttcctctcatttctgtaatcttctgataaggaaggaacgatgtgacttaacatgactctccttcaatctgaacgtgccagtgtaccttctttcccatcccactccatatatactctgtgtctgtcttttgttgttgttgttgttgtttgttttttgagacagagtctcactctgttgcccaggctagagtgcagtggcataatcatggctcactgcagcctcaacttccagggttcaagcagtcctctcacctcagtctcctgagtagctgggactacagttgggtaccaccatgcccagctaatttcttcaaatttttcatagagatggggtctcattatgttgcccaggctgatctcaaactcctgggctcaagcctcccaaagttcagggattgcaggagtgagccactgtgtctggcctccgtgactgtctgaagtctctctttcacaactctcttacagttcctgttagttgaggaaaaaaaatctggaattacagtgtttacaactgaaagggatgaagtagtcatttaggccaagtctttaatttgatgaggacttactggagagccagataaatgaagtcccttgcatatggtcatatgaatatttattggcaaagcttggcctttgtcctcctgacttccagatctcatttcatcttgtggtgcttccagcatctggccaccttgctagacctgagtcataaaagcaatggggcgctaagaccagccatactataggaagtggtgacagtttcctcatttaaagttgggttgtctttctagaatcttagagttggaactcaactcagaaatcacctgtttgatcctcccacaaaggcaggtgtctctcttgcaatattcttgagacaatcatctggcttctgcctccttattttctattatcgggagccagcttcaggaaataaaacatttcactagaatttttgtgttgttacatttagctaaaatttaccttctcttcacttctgtccttacatcccaacactgccccatgcagtaacaccaaatgcaaagacagactgtgctttcgaccacagggcactcctctagaagtgttaaaatacttatccagtatttcctcaagcttctctttttttctcaaagctaaatatctgatttttctaaactgtgccttataggttacagttgctggatcccttgtgatgctgaactttggatgtattccttttggcaaaatgactgtatcctacttatccaccaatttgacagatatttaataagcacctactaagttgcaggagatttaaaaaatacaagcatgtaaataagaaaatatacaaagtgatatataacaatacaggctgtggagaaaaattaagcagagcaaggggagatggaaaatttgtgtatggttaggagcttgggaccttgctattctattaatacagtgatcaggaaaggccccactgatgtagtgagctttgagcaaacaagtaaaggaaatgagggaggaagacttgcaactgtttggggagagaggatttgggcatagagaatagctcctgaggcagaaataagtctgatgtgtttggagaacagcgaggtggcccttgaggctccagtggagggcgtgagtgggagagtgggaggaagtgaggtcagggaggttgttatgggctgaatggtgtctccccggaattcacatgttgaagccataagccccagaacctcagcacatgactgtatttcgagataatgtctttaaagacctaaaatgaggtcactagggtgggccataatccaatatgactggtttcctcacaagaagaggaaattaggacacagatgggcacagggggaagaccatgtgacgacacagggagaagagagccatctataagccaagcagagaagcccccagagaagccaatcctgctgacaccttcatctcagcttccagcctccagaattgtgagaaaataaatttctgttgtttaaggcatccagtctctggtactttattatggctgtcctagaaagctaacacagaggggaaaagggccagatagtataagaccttgaaaaccattttaagttctttgagcagaaggggagccagtgagggtttcggagcagatgaaggtgatgactgggctcgtattttaaaagcatcactctagcttctgtactgaaagcagtctatggggaggcaaggacagaaggaagaaaaccaggaggaggctattgcagaaatgtacatgagggtggaaggtggtgaggagagggaagttttggaatatattctgaagttagagccaaaaggattttctgatgaactgaaattgtgatgtgagagaaagaaaggagtcaaagatgacccaaggcttttggccacagcaacttggagaacggagttaacattcattgagatggaaagaactgtaggagcagcgggcttttttttccttcttcaacttttaagttcaggggtacatgtggaggatgtgcagatttgttacataggtaaacgtgtgccatggtgatttgctgcacagatcaacccatcacataggtattaagccctgcgtccattagctatttttcctgatggagcagtgggttttaagggggaggaccaagagttcagtatggacacattaagattaagatgcctactcatctttgagtttgaaatgccagctaggctgttggatgcatgaatttagaattcagaggagtggtcagggtaaggatacagatggtactgagtgagatcacttagggtgaaatgaggacaaaaagaaggctttggaggctggggattgtggctcatgcctgtagtctcagcactttgagaagccgaggtgagtggatcacttgaggccaggagttcaagaccagcctggccaacatggcaaaaccctgtctctaccaaaaatacaaaaattagccaggtgtggtggcaggcattgtaatcccagctactcagaaggttgaggcatgagaatggcttgaacctgggaggcagaggttgcagtgagctgagatggcactactgcactcctgtctgggccacagagtgagacctggtccccctgagcacccccccaacaaagtaaaggatttgggattaagccctagtgtacttggaaatgttgaggttgttaagatgagcaggaaaaagagaagcaagcagaggaggggcagcgagtggagtaggaagagaaagagggtggtttccaaggagccaagtcaagaatgtgcttcgtgaggacagaatgattactgggttgatgctgcagatactgtgtgtcaaataaggtaaggactgcattgtatttagtgatagagaggtcattgctgacactgacaagagccagttcagaatggtggggacagaagtatgatttgagtgggctcaagagagagtaggggaaagaaatttgagtccagcaatgattaaaatattctttgggaagacttttgctgtgaagggagcaaaaagctgaaggtagctaaagagagataccaagagaaggtaattttattattattttttgagacggagctcactttgtcacccaggctggagtgcagtggtgggatcacagctcactgcagcctcaacctccttcactcaagcgatccttccacttcagccttctgagtagctggaactacaggcacgtgcaccacacccagctaatttttttatgagcttgagcctaggagttcaataccagtctgggcaacatagtgaagccccatctgtacaaaacaatacagaaattagtgcttgcttcagcagcacctatactaaaattggaatgatacggagaagtttagcacagcccctgtgcaagaatgacacgcacattcataaaacatttcatatatttgtagaagcacataggaaaaaaaatacaaaaattagccaggtgtggtggtgtatgcctgtagtcccagctacttgggaggctgaggcgggagaatcacctaagcccagaaggtcgagcctgcagtgagctgtgattgcaccactgcactccagcttgggagtggagtatcgcccagctggtcttgaacccctgggctcaagcgatcctcctgcctcggcctcccaaagtgcttagattacaggtatgagctgccgcacctggcaaagaggctttttttaattgaatatgtgaaaatatatttgtatgcagaggagaatgattctgtaacaaaggaaaatggacaaagcaggagaaggaacaattgttggaacaatgtcctagagtataagagagagtggcacactgaatacaagcacaggagttggtcttagatgggactgacatctctagctatattaccttatagacagccacatgtagctatttaaatgtaaattaatttaaaatgaagacaattaaattttttctggctgggctaggtggctcatgccacctcagcactttggaagcactttggaaggtcgaggtgggcggatcacgtgatgtcaggaggtcgagaccagcctggccaacatggcaacaccccatctgtactaaaaatacaaaaattagctggatgtggtggcatgcccctgtaatcccagctactcgggagcctgaggcaggagaatcgcttgaacctggaaggcggaggttgcagtgagctgagatcgtgccactgcactccagtctggaggacatagcaggactccatctcaaaaaaaaagaaaaaaaaaatccgttgtgctagccatatttcaagtgttcaatagctgcatatggttggcgactacagtactagacagcagcaacaaagaatattttggtcattacagaaagatctgctgagcatgcctgagctgagaaatgagggaaggcagacatatgtatgagcgcctatgcagagaggtgagtagatgtggttgcggggagcttgtggaaagtctttcctgatttcttctgtttctcactaaaggctacttaggagaaggacctggagctttgaggaaaaggtgcagactatatctttaggagatagagagagtgaggggacacggggaaaatggcagaattgcagaacaacttttaagatccacttcaggccagcacagtggctcacacccgtcatcccttttttaaaaactttgagacagggtcttgtgctataacctagactggagtgtggtggagcgatctcggctcactgcagcctcaacctccttgactcaagtgatcctcccacatcagcctccactacacccgactaatttttgtatattttgtagggacagggtttcactatgttgcccagactggtctcaaactcctagacttaagcaatctgcctgccttggcctcccaaagtgctgggcataagccaccacaactggccacacctgtaatcccaacactttgggagaccgaggtgcgagaatcgcttgaggccagttcaagatcatcctggacaacgtagtgagacctcttccaaacaaaaaagaattttaaaagttagtcaggtgtgaccgggtgtggtggctcatgcctgtaatcccagcactctgggaggctgaggtgggcagatcacaaggtcaagagatcaagaccatcctgggtaacatgttgaaaccccatctctactaaaaatacaaaaaattagccacgcgtggtggtgggcacctgtagtcccagctactcaggaggctgagggaggagaatggcgtgaacccgggaggcggagcttgcagtgagctgagatcgcgccactgcactccagcctgggtgacagagcaagactctgtctcaaaaaaaaaaaaaaaaaaaaagtcaggtatggtggttgtattagtccgttttcatgctgttgttaaaagacatacctgagaacgggcaattaacgaaagaaagaggtttaatcaacttacagttccacatgcctggggaggcctcacaatcctggcagaaggcaaggaagagcaagtcacatcttatgtggatggcagcaggcaaagagagagcttgtgcagagaaactcccatttttttttttaagccatcagatctcatgagacttattcattatcatgagagcagcacaggaaagattcacccccataattcaatcatttcccataattcaatcattatggaagctgcaagatgagatttgggtggggacacagaaccaaaccatatctgtggtgctcatctgtagtgctacctacttggggggctgaggccagaggagccctggaacccaggaatttgaggttgcagtgagctatggtgggccaccacactccagagccagcccatctctaaaaataatttttaaaatatccactttaggttagtgatctctaatttagggaaaccaatcagcatgctgtgtagttttttccaacttatgttcactggcatgaatgcactgttacagtaggtagaaagctggggctagtccaatgagtggttctctatcctggctgcatgttagaatcacctgggtgagttatttaaaaaaaaaaaaaaaaatcagaagcctcatccttgtagccaaaggatctgattgaacattctgaaaatggggcctgagcaacgaacaatctatttaaagctcccaaggtgattctaacacagacatgctttttttttttttttttttgagacaaggtctccctttgatgctcagactggagtgcagtggcgccatcttggcttaccgcaacctcagcctcccaggctcaagcgattctcctgcctcagtctcctgagtagctgggattacagacgcatgctactaccacctggctaattttttttgttctgtttttttttttttttttgtatttttattagagatggggtttcactgtgttggcctggctggccttgaactcctgacctcaaatgatccacccacctcaatctcccaaagtgctgggattacaggccagatacgtgtttaagaaccacggagttagagtaagaatgtggaggaaatgtgcagagtagagatgaaggatggggaactgtgttactgatggatcatgggttccacaggtgcaaagaaaggcactcaggatttgtgcagggatgggggacgggatgagattgagaagtgttcaaggctgatgagcaatgagagatgggctgggaatctagggcttcttgggtgacaaatacaaattgggtaaagggcacatggagatttgccatgctggtctaaatcagcacaatcaacataaatgtagtacagataattttaaatcttttattgaccttactagaaaagaaacaagtaaacttagtttaatagtatattttgttatccaatgtatgcaaaatattatttctttttttgttgtttttgcaaatttcttaaaaaaaaaaaatacagacagcatcttgctttgtcgaccaggctggtctcaaactcctggcctcaaactcctggcctcaagcagtcctaccacctcagcctcccaaaatgttgggactacacaaatgagccaccacacccagccccaaatatcatttcaacatgcaatcagtataaacattactgagatatttgtcatccttgtttttttatagttagtcttccaagtttgtgtgcattttacacttcaagcacatcccagttcagagcagacacatttcaagcgctcggtaaccacatgtgcagtggaccatgcaggtctaggtggtggtgatgaggtcgcaaatgttggatgatctctacagaacattcctttcagaatacaaacatactataatatactcaatcttaaggcagctgtatatgattatatagaattatgttcttatttaacccaatatagcttttccagaaaagtatcatgagagtcttagtcacatgctctgctaaagtccaaaaattccatgttggccacacttatctaatagaaattagtctggcatgaatttcctggtgaatccgtgcgagcatcagcttccagaggtgtcagtttcttttttctgtgtattctcatgccagtcttttaacaatccagtctgcctgcttgctttcatttgtgtggagctgatcttttcttattttctgacagttgaagttacttactctgggggagaaaggacgatgggaaaatgagcaaccacttgccatttaagtggtagcaaagctggatttgatttattagacctgatgctaggattccagattattataagcaagaaacggcttgcattgcttgtggaggatcacgtgacaaaggattgaccaatcgaccatggaaataacttgaaactaagttgccaaagagggggtggttggaggacaatgtctagataaaagggcaccaagaaaaatgaaggaaaggatgttatggagagaaaagcaacagagaagagtgccctcacacgtgctcgcagaaaaaaatcaggaagtcgactggggaaaaaaagtttgtgtggatgcttctctgtctacgtactgatgctcagagtgggaaagaagcaatctggtattttaacacagggaagtagacatggcttcatagatgacaccaagtgttggtagaataaaactgataactagagttaaggaatgagagtatagttctttttcaaaagaaactgacctgggagtatgctcttttgcttgcccagctggaaaaacatttaaaagctccctcttcaaacagacagcttgagtagccccagacccaggcgaactctttgtcattgtccatgccattagggcaggattttaaaacaggattctcacatcactgctctacgttggaacactgaatcagattatctttatcagacagtctacactctattccccctcttgttctggttttatgcatttctgtgctagactgagtacataatttgtcaataaagcacggattttgtgaatcagacacatccatgttaaaccggggtccatcatttcccacatggtgacatcattcctattagctaagcttagtctctatcctcctctacaaaatgaggataatgcaacatactccctggggctattatgaggctcctggggctattatgaggcttagggatgacatctgcgaagggcttggcaccaatgggcattcaataaatgctagttgggtatcgagactgtggactcaatttagacaaagatttttcatctggtttagctggttattatatatgacaaaaagagatcacaatgtgatagttggctaaagcagtctgagtcttaagtgaattctgctcagggccttaaaaatagacaaaggaaaaatgagagccaggctgggacatcttcaacaaaagtttgacatcattcttgtgaaagtattgggaggattctgatgggtggcctttagtctgacatatttcagccttcactctttctcatcaccttattgagctataattcacataccgtacaattcactcatttaaactgtacaatttaatagtttttagtatattcacagaggtgtgccaccattgccacagtcaatttgagggcattttcatcacttcaaaaacaaacccctctgcttctctctcccccagccctaggcaaccactaatctacattctttctctgtagatttccttgttctgggtattttatataaatggaatcatacattatgtggtcttttgtgattggcttctttcacttaacataatgtcttcaaagttcatccatgttgtatcacgtgtcagtacttcatttcttcttatgaccaaataccattccactggatggtataccttatttcatttgtctgtttgtcaattgatgggcatttgggttgtctccaccttttggccattatgaatactgttgctgtaaacatatgtgcataagtctttgtgtgggcattaaaaataaaaaatttcctttgagtatatgcctaggagtggaattgctgggtttcagccttctcttggtttttctgttacagggaagatcaagagttaaggactgtaccattatccccctaaaagactttcctgtaagaatcttaagttaataatgactgagcacctactgcataccaagtactattgtaggcactgggcagcttcagtaggcgtatcggattctagtctctcctgggtcaagatggagcctgacactagtgacaacttttattcacagcagtcataattgtaggctaccttatgggaacatctggtatgcccaacttacagggttgctgtgatactttgagtatcatgctttttctatttacttgtgtatgtctgcctttagctagaggcagtaaatgtggatcaaaaataaagatgtggggcccggcatggtgactcacgcctgtaatcccagcgctttgggaggccgaggcaggcagatcacttgaggtcaggagttcgagactagcctggccaacgtggtgaaaccctgtctctactaaaaatacaaaaattagccaggtgtggtggcgcatgcctgtaatcccagctacttgggcggctaagacaggagaattgcttgaacctgggaggcggaggttgtaatgagccgagattgcaccactgaactccagcctgggcgacagagcaagactctgtctcaaaataaataaatacatacatacatacatacatacatacatacatacatacatgcatacatatatgcataataaagatgtatgactttctttattgttgttgttttgagacaggatttcactctctagtccaggctggagtgctgtggtgtgatcctagctcactgcagccttgaactcctgggctgaagtgatcatcttgcctcagcctcccagacacctgggactacaggtgcacaccatcacggctggcgaatttatttatttatttattttttagagatagggccttgctgtgttgctcaggctggtcataaactcctggcctcaagcgatcttccactttgacctcccaaagtgctgggattgcaggcatgagcctccacacctggtgcagccgtacagctttcaaaaatgaagagaggaactcgtgggcactactggcatacatctaagaataaaatgtgaacaatctggttgttgtgttataacaacttggttaatacaatatgatattgatgagatgctcccaactcatcttggagtaactgaatgatgctacctgaaaggtagatatgagtaggaagtggaggtatacaggggctggagtggggcaaggaggctttccaggcatggagaaaagtgtaaactaagacacagcttatgtgagaaacaagcatagtacaagtaatctagtgttgctggatcataagggcttctgggataaagaatcttcaaagaaggagagatataattgcttaacatacagctcaccaatgggattatgcaatgatttataactgtcccctagatagctgtgtggcatcagacaagccattaacatctctgtgcctcatttgtcatcaaatgctgcatgggaataaaacgtcatgaattatctcctttctaaagtgacacatgaattgctaaaaaaaaaaaaaaaagaaaaattaagttctaaagaactttctttttttttctttttttgagatggagtctcactctgttgcccaagctagagtgcagtggtgcgatctcggctcactgcaagctcctcctccagggttcaagtgattctcctgcctcggcctcctgagtagctatgactataggcgcccgccatcacgcctggctaattttttgtatttttagtggagatggggtttcaccgtgttagccaggatggtcttgatctcctgacctcgtgatccgtctgcctcggtctcccaaagtgctgggattacaggcgtgagccactgcgcccaggctaagaactttctaatattgtcctatatgtagccaagccttgtgcagataaagattattattgccgtttgggacaagtggatgctttcagagagtcttagttgaggtttcctagaggctgaacctgagatagagatccttatgcaagtggtttattgaacttactagttttggaagaaactagtaagaaggtgagggaagcagaaaagggcaggaggagaagcaaatgcaaatgttaaaatagaaggatttaaccactttcaaaaagagggcactcatttacaaagtagtaaaggacacacatttaattatataaaaatgtgcatagatgtttggaaattttgacatgtagtcacagaataatgtgaaaattatatacaattattgacattcaaatagcagaaacatagaaagtcaaaggttggccatggatgaccctcatcaagggcaaatgtgtacacatctatgcacttatatttaatggcaatgaacttgtcagctacagcctgtttgacatttacagaatgatgtgtgataatgggattgatgaattcattagcattatgaatcatacataaatagaatctttagcacattttattaagtgtgaactaaaatatgttgtttggagaggacaaagattacaaatgttttaaactgggttcccaaagggcaaggaaaattaaacagtcagattccaccctaaatgatcaaaaggtggaatgtacatctcagtcacgttgtgctgatgtggcagtagggccagaggagttttggaaaatccaaagaagcacaaagcttgagtatgagcataaaggaaaacaccaagcgctgagtcagacactggacaagaagttcttttctgatttttcaaatgaaaagactgtacagttgagattaaggttcattaatttattgattcaaccaatatttagagagcacctcttacgtgctgggtcctgtggttgttgctgcagttacagacatgaagaggcaggaatgagctcccaagccaagtatgcaggattgtgtcatttctcgttccatgctttttgctaatcatgtctgggggtttataggctgtgtctacatttgtgtggtttcctagagatttcaaatattaaaaaatatccaaaccccttcccattgccttaaactcttcccttaattcatattccagaattggcacagggaaaaatggatctcttctttcccccaggaaaaaaaccccacaagcttatagttatggtaaattaattggtgaatattcttcattaactattctgtatcttaatttttttccctgaaaaatgaaaatgttacttataccactgggagcattttgctgattattagtatccaaggtataaaattttttgagattctgggaacaagaactcccccatggagagattaaactaccttctcttatacattatagagtttactatcttgatttatttcttcttgttgatctctaatccatccaataaccatagccactagtaattgtgaatatctttttattatatcgggtttcttgtaactttgaggattttgttttagtaaattaaatatattatttgtacatgtaattttgctgcatagaacaactggatttctggataagtagcttgaatgttatgtcctagagaataggagtttattacttgctaatatggcttattacattctgatgaatattttgactatgatctgagttgaattgataggaatacattttcgaagtacttaaaaattatttatggtggttcttttgtagtgttttcctttttataaaaccacactgtctgagaagaactctcttacttctgtgtcttaacttgtgggaacaatttatttatttatttattcatattagagatggggcctcataatgtttcccaggatggcctcaaacttctaggctcatgggaccctcccgcctcagcctcccaagtagctgggcctacagatgcccactgctgtccccgactatctatatgaattatctttatcattgaaaatttaggccaggcgaggtggcacatgcttgtaatcctagcactttgggaagctgaggcaggtggactacttgagcccaggtgttcaagaccagcctgggcaacatggtgaaatcctgtctctgtgaaaaataaaaaaattagtcaggggtagtggtgcacacctgtggtcccagctactcaggaggctgagataggattgcttgagcctgggaggttgaggctgcagtgagctgagatggcaccactgccttccagcctgggtgacagagtgagaccctgcctcaggaaaaaaaaaaaagaaaaaaagaaaaagaaattttatcaatgtgtttgtgctggtgtcagtttaaagcctatagagagtcttggaatttatgggatgttgaatttttaaaaattcatttgtattaagtggactttttataaaagagtaaatacctaattaaaataatattttatctgatgttaccaaagagttcttcatttcaacgttccatccctgagtaagttaacttatgaggaatgaattatattacctagcaacctccatccatcttaccacattgttaaaagcctatattctgcaaataattcacgtaatgaaacaataggcataaattaagttatacatttaattaacatatacataattaaattatatataccaagaaacattaaacttttaaacaattataaccaaattcattgctcatttcttctaaatcgatatttacatctttattgttaatttctaagaaaagccttaataagaaaaataacctaggagtatcttgaattagcaaatgtatgttttatagaaattctacattttatagattctatcactgcttctacagtacatacatttttatatttatggattcattggtatcctataaatagcctggatttttaatataatttatactactagagtataaattatactctagtataatggttctcaggtgcgcatatcagaagacaaacacagagatggttgacattgacatatagcagacttttatccccctaaaaatgcattttttttagcaggttcaaaattggaagcatgaattgaaacaacacagaaataacatgtttgcttacagtggataaattttgtactattttatagaaaacctctacaaatttaagacaagttaccgagcttgttgacaagttatgaggccatatgaaaagcaaacacacaaacaacaacaaactaggcactaagaaaaagtaaaaggaaattaaagttggtcattgcaatttaattaagacaatagtttgaatgcaaatgaagacataagacaaattcaatggaacattagaaattgtcttgcttggtactgtagtttatataagcagaagcggagacatactgaggttaagttttcatccaaagtcaccattagattgtggcagagctggctcctgtctcttgttgagtcttcttttcactgcctgacattgcctcttataaacaggacatggtgccagttaattataattgcttaagaaaaagcaattgaaaaaatggtgaatggtaattacatatgggctgaaataacattgatataatcaggaatatttgggggaggaaacaccattctagaacatctatttcaaccttggcaagctggaatgacaatctgcaactttatttttaccagttatcacttactggtataatgaaacaaatgctaaccgtaaaatttaattattaaatcaaatattaaaataatttataaacatgtttaaatcacattgcacaaaggaaagaaaaggggttgtatcattttcaggcataaaatcatttccttcttccttttaatttgatgttagaccagcttttttcatagtcaaatttgtacggaaatgcccagagagggcaaacaaggagcttaacagatgtcattttgctattctgtgaagctaaatagaactgtagtttattgaatgatttctcttacttctacttctgcttgaatgtagattgggggatggatagtagctgagtccaatttaatttgttcaattactcaccatttgatttatttatatcatatgataaattaatcagtttgttttaatctatactctgtatagggtttacaataagaacatcatttaaagtatggagtgcaactcttacaggttatatatattcattttattttacgaaaatttaatgtcatatacttatgcatttaataatatataccaaatatttataacaattcatcaagcttgacatttttttaaacaagaataaaatttcaagaaagttggaagaaaatacaaagaatttttgctccctctcctcatccatttgaaagcaaattgccaatacgatgccttatgaccccagaatgcctcggtagattacaaatgaagacactatcatacaacaaaatacaaccattgaaatcaggaaattaaccttgatattattaacatcaagcttgccagttgtgtagaaagaggatccagtttagaatcatgggctgcattttactgccctgtctcttaagcatttgtaggctttggaaagtttaaattttttcttgagtttcataaatttgacaattttgaaactcatagcctagatattttgtggactatcacttaatatggatttggctgattttatctcatgattaaatccatgcatctttggcagggatatcacagaaataatgctgctccctcattgcatgctgtctgtggtgcatgactgtgacttgttcagttactgatgatgcctctgtgataactgggttaaagtggtgattgccaggtttcttcacagtcgtttactctttcctctttaagaaataataagtatttcatggtgaagtactttaaaactctgcaaacatctcattcctcttcaaactttcatgttattcatttctttctttatatcttttctttttcttttctttctttcttttttttttttttttttttgagacagagtttcactcttgtcacccaggctggagtgcaatggcatgatcacggctcactgcaacctctgcctcctgggttaaagtgattctcctgtctcagcctcctaagtagctgggattacaggcacccaccaccatacccagctagtttttgtactttttgtagagacaggatttcaccatgttggccaggctggtcatgaactcctgacctcaggtgatccacctgcctgggcctcccaaagtgctgggattacaggcatgagccaccacacctggcctctttctttatacctttatagatttgtggtctacttatttaatggactaaaatccactactatgattatttattttaatgttccaattgttgctgtgggcaccactttgattgcttttataatcttttgatatttctctattattctttaagtatttcctgactttctggtacagcaaaagattctaggctcattttgtactttttctttcccatccaggaattggtcattttgctaaagggtcctgtttctttgtaacgagaatagtatttagaagccaagatttggttgctaaatgtactcattactcttggggtgccactgcctccagactgtttcagaggacaaaaactaaggaatatataataatatgcagacatgcacccatatatatgttacttatatgtctacatttatatacatttataaattcataccaattccttccatttcagttcaataccattgagttcattctatttttctttcatttcaatatttgtagctttcttctctgacagttgagaaacctggtttgccaattatactgaatatatttatttatttcatcacacctgtttccctccaacagtccgctatatgtggctaagcttccattgccattctactctccaccatccacgggtgctgttgcattctgcttaggctctgctggcctcggccaggccatccctccatgaagatgccgtctttttttctttttttgagatggagtctcgctctgtcgcccaggctggagtgcagtggcacgatctcggctcactgcaagctctgcctcccagattcacgccattctcctgcctcagcctcccgagtaactgggacggactacaggcgcccaccaccgcgcccgactcattttttttttttttgtattttcagtagagatggcatttcaccatgttagccaggatgatctcgatctcctgactttgtgatccacctgccttggcctcccaaagtgctgggattacaggcatgagccactgcacctggccttgttatggtgcctttttatttctttgctcctaagaaatagtcctggactttgtgatgctaccttactgtaacatcaatgttaatgcttttaaatattttccacaggtgttaagtcatttattactttactaagtcacagagtgccatacattttatatgaaggatagggatccatttcctcaaattataactgctagtaagacagaagcatagtgtgatggtttattttaggtgtcaacttgactggattaatggatacctacataactggtaagacattctgtctgggtgtgtcacaccaatctcttagatggactaaaccgggaagatccaccctcaacacaggtgagcaccatccaatcggctgggggaccacatagaacaaaaaggcagagaaaaggtgaatttgatttctctctcttctggagctggaacaccctcttctgctgcccttggacatcagaatcccaggttttccagcatttgggctccaggactcataaaagaagcagccctctgtgtaatcaggctgtaagcctcagactgagagttacatcgtcagcttcttttgttctgaggctttctgacttgggctgacccgtgctgccacctctcctgattctccagcttgcagactccctatggtgggacttcttagcttccatgatcatgtgagccaattcccctaataaatttcctgttatctatgtaactatctgccattggcatccaaaccagagtgattcactcttcaataaaggctgaatgaagtgagaccttctaggttacattcccaggaatttaggtactcttggtcataagatgtttatggttgaaggaacaagttaattatgctaattaagacccagaacttaaggaaatgtcctgatatccagatatcttaagaacagaccaggcaaggtggtgcacacctacaatcccagcacttttggaggctgaggcaggtggatcacttgaccagactgggcaatatagtgcaactccatctctccaaaaaatacaaacattagccaagagtgatggcacacacctgtgaccccagctacttaagaggttgaggtgggaggattacctgagtatggggacatccaggctgcagtgagccatgattgtgccactgcaccccagcctatgcaacagaataaaaagcattcttagtttaggaataggtttcgctttaaagattatagtacatccataaattcttgctgatatcaataggtaaacaaaagaagaacaatactaatagactgttacaagctaatcacaagcctttgtataataataaagcacattattcttagttctaacattgtatataagcaagcattatgtttgacgtaggggcgttccttctctcgctttctgaggatgccctactctgtaataagagtagtctctagtaaactatcttaatttcactctactctgctactcacactgaagtcattcctgtctgaaatccaagaacccactcttggggtctgggacaagaccctttttctagtaacatctatctatcttctatctatctcccgcctattggttctatctctttggagaactctaatacacacagtaaagttaagattaacacacagaagcaggtcatggattattcaggtggaaccacaggggacatttggttgggattgcatgattaacgccctaccatgtcatgtcattgatcaatggtcacttctttcctgagcattagcatgtctctaagatttgctcttatctatcaaatgaatgcagaatgccattcatgtgataaaccccaacaggtcccacagaattttcacagtctattgtgtcaagttgtacttaagagagattttttactttatggatcaatgactggatagatcaaaatgaatcctttaaagctatcatattttatcagtttgctgcagttgtcttgcaggctcaatgaaaccatgtttcctagagtccaaaaatctgggaggtgaccatcgactcttctagatgagctggtgttctctgcttaactaactgctcaagttcattccatgagggagaaacctccctttttgactttgaataccactgctgagaattgtgcttctatttcactttgtggaatgcttgaagtgatttttacagaattctttttggaaatgttaatacttgtggaacaaatggcttattgttaaacttggagctggaagacctggatttgaatgcggatattgccagttactagcagtgtgacctcagtttcttcagtaaaacaggatattatcattgtctgacaaagttttttgggcctcagttaaaaaaatgttaagttaaagtcatttcggttcttgaaagtgccaagcaaatgtgaggcactattagtattttgtaaaaagccatttctttaaagggaagacaattcatgaagaaaaaattcaaatgaaagcaaagtaataaataaaattaccgtaagaactgatgagagaattctgattttgtagatggaaatttgtttttgaatttaatgaatatacatatatttactcctttaagtagttattttatgtttcaaaaagattcaaacattttaattgcaaaaagtctttgccttgctttaaaagcaagtttaatttcagggacaatacacctattcattacccaaaccattcctaagcagtaacagccttaagagcctattaatgtaagggggggtgttaagtcttattcaaaatgaattgaacccctgactccaagtcagctagtttatattctaagacaatgaaaattaagaacaatgatttagcgactcgagaagactcaatctaatatgatccgaaaaaggccaattatcgtaactcttttagccaatattaacttctgaatgtgtcaaattctccatcttggaaaaactgtgttgactccagcagacataagaagttttcttctctcattaacaaaccttctatgttagaccagaggaagaagcatttaactggcattattctaaaaataatgaaacaattcaacaaatacatattttataatgattttgtattaaaatagaactggttttacttaattggttgtaatttaaagttcaaaatcttaaaaatatatttgttgtaaaaatgtcaccaggttctgtgttatctcttttcaattttccttgaaagagttgctcattatgatatttaaattcttgtgtcttacatttgaaaattagtactgatttttcaatacaaaaaatcctatcgaaacagcttgaaatcttagcagtctttgtacttttcataacatattttattatacatattttatatacaaataaataattaaaaatatataaattttatttttaatttttttgaaacagggtcttgctctgtcacccaagctggagtgccatggcacgatcttggctcactgcaacctccacttcccaggttcaagtgattcttctgcctcagcctcccaagtagctgggattataggtgtgcaccaccatgcctggctaatttttctatttttagtagagacggggtttcaccatgtaggccaggttggtcttgaactcctgacctcaagtgatccacccgcctcagcctcccaaaatgctgggattacaggtgtgagccactgcatccagctctgtattatatactgtagtagtctgtacaaacaaaagcatgtatagaattttggcattcatgttgaaaatatgaccacagatttcttcttaggtacatgggaagattgccttgtattctagttttaggtttcagcaatttcaccactgaccattttattgaaatcatgtagtgctgtaggtagtcagataatgagatgccacttaaaaggcctgaaatacttggggttgcataatggggatgtatgtactacgttagaggctaattccaaaatttggggaaagactaataaaatgtttctcttgtcaactgaagaatgatgaggttcataaatttagaaaggtgagctttgttttttataaagaattgcagccctcgggtggccattctgacagggttggaagtgtagcctcctgccagaagccagaaaccggcactttgagggagggaagaataagacaggaatttatgctgaatgcggtggttgaatatacatttttgtttgtttgtttgtttgtttgtttagacagagtcttgctctgtcacccaggctggagtgcagtggcacaatctcagctcactgcaacctctgcctcccaggttcaagtgatactcctgtcacagtctcccgagtagctgggattacaggcacccaccaccacgcctggcttatttttgcattttttaatagagatggggtttcaccatgttggctaggctggtctcaaactcctgacctcaagtgatccatctgcctcggccttccagttgtttgtttttgaggcagagtctcactgttgcccaggctggagttcagtggccccaacttggctcactgcaacctctgcctcccaggttcaagtgattctcatgcctcagcctcccaagtagctggggttacaggcgtgtgtcaccaagcctggccaatttttgtatttttagtagagacggggtttcgccatgttggtcaggctggtcttgaacttctggcctcaagtgagcctcccgtctcagactcccaaaatcctgggattacaggcatgagccaccatgccccacctgaatatacatatttaatcagctataggaaaaggcacaaatatacgaaaagagaaacgtgcacatagttgagcttcatgcctgtccatgggcatcatgttcaaaatatggtggcattagtataatctgaggatggagttttcagccctctgactcaaaaggtgaagcaggcaacacaaaaaccctcactatgcatcctctataaaccggccagagccacttcatgttcggtgttcttttgtcaggaaggaaagctgagtggtcgttttgtcaaaactgcaaaaggaaggatagtcacaaggttggtggaaatcactggcggagccagtctttcccaatggctggtttctgtttaacccttaagaaagaaagcctcatggctgttagcaaggttgcaggggaggtgaacgaggcatgttcaatcttccatgtcatcatggccaggagcacagttttcaaggtttctctgcagtaccctttgccaagagagagttctattcagctggttggggggctcaggattttatttttatttctcactcttaaggggaacatcaacttagagggtcttgtccatgagactgaaatgtcttccagttgtcttcgagaagaatgtcctcatttgagtttccctgaaagcagagggcctgagacaagtatgtgggctcaggtagtttctttgggaattaatcccaggaagcagaagtgagagagtagaggcatgggaaaacatggagttattgagctagctacccctgtggaaaactggggctccattctgttgaagagcttctaagaaactttgtggaatccctcagacatgtttcagggaaggacagggagactgggacacccgtctattaattcagtctcccattgattgtgggttttgctagaggcactttggcaccatgcacttccaagtgtgcctgtttaggggagaggcaggctgagttgctttcagtgactgcagagaaatccaaattgtgagatgccacagcacagcttgaggtgggatgctggttgcttgcacagacttgtccttcgcagcagtgctgaaatctagtggccaagggaagtggttgaggcaccacaagtgtctgctacagataagagaaagcaaatagtataaaagaagttattatccaattatttctaatagagttgagggagtgtcattgctgtagggtcatggtctgtacagagtggtgtatgagatgaggacgtgctaccccaaaatatgcctctttggcgtaaagattactttgagctgatcatttttagacactagacacaagagaagttttgaaaacacaaacatttcccttttgtaagggaaacttacacctataaagaaaaatgtccatttgtaagtgtgtctccctctctgtacgaagaagggaaagatgattaaattactagagacccacccacctaaatctgcataacaagccttactcttatttactgtgctgtttccagtcacatccccattactggccttcccaacacccttctttctttgtttcagcagaagatggtgcttaagcctgaattctaagtcacctcttggagatttgctcatttctttgggtatctcccagtatacatgaggtatatatgttattaaacttccgtttgctatactatgcagccataaaaaaggatgagttcatgtcctttgtagggacatggatgaagctggaaaccatcattctgagcaaactatcgcaaggacagaaaatcaaacgccgcatgttcccacccataggtgggaaatgaacaataacacttggacacagggtggggaacataacacactggggcctgtcgtggagtcggggtaggaggagggatagcattaggagaaatacctaatgtaaatgacaaattaacgggtgcagcaaaccaacatggcacatgtatacatatgtaacaaacctgcacgttgtgcacacgtaccttagaacttaaagtataataataaaagtaaataaataaataaacttccgtttgcttttctcttgttaatgtgtcttctgttacaggggtccatctcaactaagaactctgaaagttagaaagaaaattatttttccttccctacagtttaaaatgagagttaaaggcattttcttgtattacacagaagaaggagaatgctgtgatttttcttgattaatgttgagtatcgaaatggatgtctttctataatgactggagtctaattagctatcctgatttgaagaaagcaggttttcagaaacacagtgtcatatgttcctcctaagttcattaagtaaccagtgatctgcaatttggtatcccagatggacctaccctcaggaagtgaatgtcctgtgcaaagggctatttttcagataaagctcccaagatatggaatagtgttgtagaaaaaaattgggttcttgtcatgcgaccaggaaaatttagacatgcagatgcattgtagggtgagtagggcaggatttattaagtgaaaagaaaatgggaaagaggaactctcagcaaagcgagagagagtcctgccagcaggtctcttgcctcacagattgaatcccaggtcaccacccaggaactgaagaggccaggctcctccccgctgcaaaaggtgcagacttcccaaggctccgccctcgtcctcccggtgcataggtggacattattcagaatcagtcgggaaagggcgggtttcatctgggaccagcagtttggtttttcagccttcaggctgttttatgcttggaggtggggaccctttcgccggggacccatggctggcttctgtctctatcaatagcatatttgagtgcagggctgaggcagcctcttggaggcttattatcatgtatcaaattcttaccccagagaaaatcagagttgtgatttgaagcgttattagggtaattgcatctgagattttgaataatcatcaacagtcacctaatctgcatcacttattttataaaaaggctaatagacattaataatttacctaacatcaaatagtttgtgaacagacaggctggaactcttcagactggaattcagttcaatactctgcaatggcatcatagataatatgcatttgtcaatttgcataatcaatattttatttttgtaccatgcaggatcattgtttaagtacacagtgatatacttcctgacctttagaattttaaatcactgggcttagtgaaatcccccaaacacatttaaaaactcatagaaaggcatatgaatgcaagcatttggagtgttctgaataccaaaagccaaaaccagtacaggtaaatgacaagcatcacttaaaaagaatgtctgaacagctggctgaataaatcagccaaagttgaaacactcttttcacttgtctgtgaaatttttcttcctagaagtgagggagtcccttgagggaaagaggataacaggtaagcgtattcactgtttgccacttctagaaataaaatgctgcgtatgtattcatatgtatgatatataacacacaactaaacttttttttttttgagacaatgtctctctttgttgcccaggctggaatgcactggtgtaatcacagctcatggctcacagcccacctcctgggctcaagggatcctcccatctcagccttccgagtggctgggaccataggtgcacactaccatgcctggctaattttaaaattttttatagagatagggtcccattacgttgcccgggctggccttgaattactggcctcaagcaatcctctggccttggcctcccaaagtgctgggattacaggtgtgaaccactgcacccaaccacaagtaaacttttgaatccaaggagacacatggtgtggggtccagactgctgtgaccatcctatgtcaggacaagtctagtgcttcactatcaaagacatttctgaaacatggcctgggcttggtggctcacgcctgtaatcccagcactttgggaggccgaggcaggcagatcacctgaggtccagagttcgagaccagcttggccaacatggtgaaaccctgtctctactaaaaatacaaaaattagcctggcatggtgacgacctcctgtaatcgcagctactagggaggctgaggcaggggaaacgcttggacctgggaggtggaggttgcggtgagccaagattgcatcactgcactccagcctgggtgacacaatgagatactatcttaacaaacaaacaagcaaacaaacaaaaaatgaaagaaagaaagaaagaaaaagaaatttctgaagcagaataaaacaccagccactgaaattggatttaatataagtgctttgtgactttggtttatacttttgttgctagggacatggaattttcatttttacctccagcttggaaccagccataagccagtgtctcctcatggctagctaagagcatttcctagtctgtttgggaaggagatagaacctcattttcctttctacattccctatgaggcactcaaattccttgaaatcatatttcccaggaatcacaaatgaaccaatctaaactctgtggggatgatagactttcttgaggtcctctggatttcctaggtccaaggattggtatttgtggtagtgggtgatgcccaagggtgaaggagaactgttactatattcagaaccctgagagttcattctgtccttcacttgaaggaaaactatcaacaggtaacagcaccccttagacttgctccttcttctgtggatgcccttttctggccatgggcacttgaaggaaatgaatgagagacccaggacataggcgctggggaaggagtagagattgatgtcagctctttcctggaaaggttaacagaaactacagggcatgatttattgaaataatctgggtgaaaatgcttgtatatgctaatcttattttttattttattttgttttatttttgagacaggctctccctctgtcacccaggctggaatgcagtggcatgatcttggctcactgcagacttcgcctccgaattcatgtgattctcccacctcagcctcctgagtagctgggattacaggtgcgtcccaccacttctggctaatttttttttatttttttattattattttttttttagtagagacagggtttcaccatgttggtcaggcttgtctggatctcctgacctcaggtgatccgcccgcctcggcctcccaaagtgctgggattacaggtgtgagccaccgtgcctagcctaatcttatgttttaatttcaaatattatttttataattaatgttcacatcccttatttattgaatgaaaacaatgcaatgggttagataagtgctagaactaatgctctataataaactctaaaaaaccctagccggctgggcgcagtggctcatgcctgtaatcccagcactttgggaggccgaggcgggcggatcacaaggtcaggagatcgagaccatcctggctaacacagtgaaaccccatctctactaaaaatacaaaaaattagccgggcatggtggcgggtgcctgtactcccagctactcaggaggctgaggcaggagaatggtgtgaacccgggagacggagcttgcagtgagccgagattgagccacctcactccagcctgggtgacagagcgagactccatctcaaaaaaaaaaaaaaaaaaaacaccctttcttggtggaaaacgtcaaaactatttaaagggagtgagaatagtataacgaacctgggtatgcatctaatctagctccaacaattatacaatatcagttcacagccaattttatttgatctatatctctctctgtccctcctcaaattatttcgaggcaaataccggacatatttacatttacctttaatcttttcttttcttttttttttttttagatacagggtctcactctgttgcccaggctggagaacagtggcacgatcatgcgttattcactgcagacttgaactcctggcctcaagcaatctttctaccttgacctcccaaagtgctgggattacaggtgtgagccactgtgtttagcctagacttacctttaatagcttttgataagttattttttaatgtaattttgataaaataattgtacctaaaatgtactaatgtgttggtattgtctactatccaatctacgaacaaattttactgattcattcgtaactgaccccagagttggtttgtttgaatcactgtaactgagcctctattataaagatcatacgatgtttgttttacctactttccctttccccttgtccttttcttgctctatgcgtgcttgcttgcatgtcattatttcagtagagggtagtcactaataattgattaacttcatatcctaacctacaggggtgcctggcagattgatgaacttgtttttcttttaaagaaccatgatccttaggttatgcagacctccttgatggtgtccagaaatttgggtagagggatgccaacagctttgatcactgggggagtttcatctcccatatacccaccttactcatacaagtccccagttaaattcaaaggcagggcagatttgagagactgtctctcctgccctcttgctttggtcaaattgaataaacctttctctgttcctgagtgctgatgtgtcagtgtttggcttaccatgcatcaggtgcacagacctaaatttggagattctgtaacatcaagacccatatgacgttcacatactggattaggctgatgactcatatatctctcttttaatgtgtgaccatttacatctctttctctctctcctcccttttttttttttttttggcaatttctttgttattaatggtcttgttttaaagtgaagtattgtcatttaagtttatatatcaatgttatcattatttgtttatttacaacaaagttttatgccaaggcagtcatgccattacccacctgacctgcttttccaccatcagttttacctgtgtgtgtccctggatcatcaggaagcattgattgagaatctttttctcttaatctgccttactattttctaatgtagttactgatcaaacttagcagtaacccactcattttgtgtgtaggcaaaagcaactatgaataaacagaagaagtctcccacagtgggtaaatgtgtggacctgggtttgaaacctgatgaaacttgctggctgtgaccccttgggccagggattaactgctgtcactcttagttccctcaaccctcaggtgcatgtgattatattcactgcctgatatggtttggctctgtgtccccacccaactctcatcttgtagctcccataattcccacgtgttgtgggagggacccggtgggaggtgatggaatcatgggggtgggtctttcctgtgctgttcttgtgatagtgaatgtgtctcatgagatctgatggttttaaaaacgggagtcctcctgcacaagttctctctttgcctgctgccatccacataagatgtaacttcctcctcctttccttctgctgtgattgtgtatcctccccagccacatggaactgtaagttcaataaacttctttcttttgtaaattgcccagtctcaggtatatctttatcagcagcatgagaacagatcaatacagtaatttggtagcaggtagtggggtgctactctaaagatacctgaaaatgtggaagtgattttggaactgggtaacaggcagaggttggaacagtttggagggctcagaagacaggaaaatgtggaaagtttgaaactccctagagagttgttgaatgactttgaccaaaatggtgataatgatatggacaatgaaatccaggctgaggtggtctcagatggggatgaggaactttttgggaagtagagcaaaggttatgtcttgttatgtgttagcaaagagactggtgggattttgcccctgacctagagatttgtggaaccttgagcttgagagagatcatttagggtatctggcagaagaaatttctaagcagcaaagcattcaagaggtaacttgggtgctgttaaaggcatttagttttataagggaagcagggcatgaaagtttggaaaatttgcagcctgacaatgcaatagaaaagaaaatcccatattctgaggagaaaatcaagctggctgcagaaatttgcatatgtaacaaggagttaaatgttaatccccaagacaatggggaaaatgtctccagggcatgccagaggtcttcacagcagcccctcccatcacaggcctgcaggcctaggaggaaaaagtgatctcttgggccaggcccagggtccccatgctgtgtgcagcctggggacttggtgccttgtgtcccagctgctccagccatggctgaaaggggccaacatagagctcggattgtggcttcagagggtgcaagctgtaagccttggcagcttccatgtggtgttgagcctgccagtgcacagaagtcaaaaattggggtttgggaacctctgcctagatttcagaagatgtatggaaatgcctggatgccctggcagaagtctgctgtaggggaggggccctcatggagaatctctgctagggcagtacagaagggaaatgtgggatcggagccccagcacagaatccctactggggcaccgcctagtggagctgtgagaagagggccaccatcctccagaccccagaatgatagatccactgacagcttgctccatgcacctggaaaaaccgcagacaacaccagcccatgaaagcagctaggcaggaggctgtaccctgcaaagccacaggggcggagctgcccaagatcatgggaacccacctcttgcatcagcatgacctggatgtgagatttggagttaaaggagatcattttggagctttaagatttgactgcccctctagatttcagacttgcatggggcctgtagcccctttgttttactcaatttctcccatttggaacagctgtgtttacacaatacctgtacccccattgtatctaggaagtagctaacttgcttttgattttacaggctcataggtagaagtgacttgccttgtctcaaatgagatgttggactgtggacttttgagttaatgctgacatgagttaacactttgggggactgtttggagcacatgattggttgtgaaatgtgaagacatgagatttgggaggggcaaggtgtggagtgatatggtttggctctgtgtccccacccaaatctcatcttgtagctcccataactcccacttgttgtgggagggacccagtgggagatgattacatcatggggctgggtctttctcttgctgttctcatgatagtgaatgggtctcacaagatctgatggttttaaaaacgggagtatgcctgcacaagctctctctttgcctgctgccatccacataagatgtgacttcctcttccttgccttctgccatgattgtgtggtctccccagccatgtgaaactgtaagtacaataaacttctttcttttgtaaattgcccgctcttgggtatgtctttatcagcagcatgaaaatgaactaacacactaccttagagtgttagtgtgaaaagaggcaatgtttgaaaatttttagcttggtgctgcccacactgtgagcattcagtaattgtgagctgtaatgctcactgttgtgttccattcccacagtaatttttgtgtatgtgttttgattttttagacttaaaaaatacagttttagatttatagaacaattgaacagataatacatagagttctatacacccaccccatccctacctctcaatttccctccacaatttcccctattattaacaacttgcattggtgtggtacatttgttaaaattaatgaaccaatattgatacatgattgttaactatagtccatagtttacatgagggctcactctttgtgttgtgtacttctatggttttgacaagagtataataacacatatccactgaaagggatcagaatatgctaccccaaaatattctactttggcataagaattattttgagctgaaggcaatttagaagcagcagactcaggaagagctctctgacctctcttttctgcctaaaagcaggggataaatttcccttttcccatactgaggagaggagaatgattctccattcttacaaccagagagaacttgagtttgtgtagcaaatctcagtaaacagcccttatctaccatgtacttcctagtcaccttctcccaatttaccacccctaggaacccaagctccccatttcttttgtctagtcatgtctccccgagttatcatcctttgctaaaatggtgtattagtcccttttcatgctgctgataaagacatacgctagactgggtaatttataaagaaaaagaaatttcatggactcacagttccatgtggctgaggaggcctcacaatcatggcagaaggtgaaagatatgtcttatatagtggcaggcaaaaagagagagtgagaaccaaacgaaagggtttccccttataaaaccatcagatctcatgagacttatttagtaccatgagaacaatatgggttaaacccatgattcagttatctcccactgggtccctcccacaacatgtgggaattatgggagctacaattcaagatgagacttgggtggggacagagccaaaccatatcacatggtatataagccccagggtctaactacctctctgagttttcagttctcttctatgaagcccctgtggacataaaattaaaaataaactttgtctgcctcttctctgattaatctatcttttttcagtttaactcttaaattccagccacagaaactaagagggtagaggaagtttttcctcccctacatattcattatagtttcatacagaacaatttaaccaccctaaacataccctgtgtacctattcatctttctctccctcccttaaaatctctggcagccactgtctttactgtctctatagttttgccttttccaaaatgtcatatggctggaatcatatagcacgtatcttttttagtctgctgtctttcacttagcgatatgacttaaagtttcatttaaaaaaacgcatgtgatttgtagttaatggaaaggattacataaagcacattttatgtgaagacatgggagttgcttttgatatttttacttccttgattcaatatgagactgattagagggctttctcttccagcactgaccagagggtagaaagaaaaacgcgaggattctggattctctctttataagcacattgtttatggttatagctcatccaggttgagtttagtgcagtggctcctacagctgatccgtgaactagctgcaacctgaaaatacagattccttcatccctgggagtttgtgactctggagcactggagaaagacccaggactgcatttttaatgggcttctcatgtgatacttacttatacagaaccatttctttggtagtaaaaaggaataccggctttggtctcagaggatttggcgtcaagtcctctctcttcattgaagcaccaaatatttatttaactcctcccatgtgccagaccttggaccaggctctggattgatacaacagtgagcttaatagtcatgctttctacccttcacaagcttacactggagaagaggcaggcattaagtacacaattacagaaataaatcttattcatcaactatgctaagtgctaagaaagaaaatacaaaatgctatgagagagtgttaaaaaagggatctggctttgtttgaaatggggtcaatgattcacttttccctgagataatgactttgaactgagatattatttacgtgacatgagggaaagatgtctgccacccgggcacacgaggtccatttggcttggaacacaaggagagacagagatgaggctgcaaattaaccacttgatatctgtccttctgcagatcaacagccagggtcactgggtgtctagctaacctcctactcaactgcactgaaatttctcccaaatctccaaaacatgtttagtaattctgccagttatatttatcaagagcttaaacaatcagattgttaatagccttttcttaaaaagtgttagaattttagttgttagtgaatgattcttaaaaggctgttctgtctttgggttagggccaattgttcatttactgaaagatatacacggaaaagaaaaggatctgattctgcattgccactacttaagcgctgtgaaatgcttgagcttttgtcaggtgtctgtagcctcatttcatcttcactgtagacttgtggaaatgcattattatgacgccaattgtacagatgcagaagtaaaggctgagagaaatgtagaggttcactgcattgacatagtgaggaattgattgcagtggttggctgtcagggaacagtcaatgtccctagctaggacaattttaatactaccattgtgtcagttttgggccccagttatgcattctcttttggaagacatacaacctggacatacttatgtgaaccccgaaaatctgaggcaggtctcagttagtttagaaagtttatttgccaaggttgaggatgcacgcccatgatgcagcctcaggaggtcctgaagacatgtgcccgaggtgatcagagcacagcttggttttatacattttagggagacatgagacatcaatcatcatatgtaaaatgaacattggtttagtctggaaaggagggacaaatcgaagcagggagtgggcttccaggtcgtagataagagacaaatggttgcatttcaagtttgtgattagcctctccaaaggaggccatcagatatgcgtttatctcagtgagcacaggggtgactttgaacagaatgggaggcaggtttgcctttagcagttcccagcttgacttttccctttagcttgatgattttgggggtccaagatattttccttttctttttttttttttttctgagacagagtcttgctctgtcgctcaggctggagtgcagtggtgcaatctcagatcaccgcaacctctacctcccaggttcaagtgattcttctgcgtcagcctcccatgtagctgggattccaggaacgtgccaccatgcctgactaatttttgtatttttagtagagatggcgtttcaccacgttggccaggctggtcttgaactcctgacctcaggtgatccacctgcctcggcctcccaaagtgctgggattacaggcgtgagcctggcctttccttgcacacttaacatcccaggatcttacttaatgctgggaatgaggttctatggaggactcccggtgttttttctcctgctctccaaagccaaccaagatctcttcagaaatcttcagctcagcccaaaggagaaacttccaaggtaaaagaattttcctaaaagtataaatgatattaagaattctgcccatatggactgggattatgctttatttcctgatgggcctttttcaaaataaatcatgttcctactctccatcttagcagatgatgaaggcaattgctgctgaaatggaaccatgtggtaacccctgcattaaagcaagtgtaggtttattacatacattggacacagtaggtgacaatgtagaattatttattttaagggtacaagaccatttaccttccttcctcaatatccttcttataccttattatagtgctgcactttacactgtaagaatcattccttggaatttgtaaggccctgaatataaaaagccactgttaaaatagcatgctacctaagaaaagtaacccattaacatccattaaggcttaagtgttaattataatcatgaagtttgaaagttatggctaaatgatttattattcagaagccaaagccttctagatttgtttgactccaaggatagagtcaaaagttcaaacgattctaataatgcaaaaatatcaagaaattatggaatcttctcattccacccttcctctttatcttaaactgctactatttcaaaatatatgtgttagtcatgccgattactgtgaggttatcaagggtagtcttcaatatagagcctttactttcttttcagagctttatgggagaactggttgtcttctatgttttcccttgagaattttgcttatctgttgtgtctgtcctaaatgctacagtagttggtctcagactgagctgtgtttttgtacactgtcatggacagtagcatttatgaagcattttttgcatacaattcttgtctttgatagtgattatattttgtattttaataaattatcctgggctgggtgtagtgcctcatgcctgtaatcccagtacgttgggaggccaaggaaggtggatcacttgagcccaggagtttgagaccagttgcagaaaccccatctctacaaaaaatacaaaaattagcagggcgtgatggcacatgcctgtagtcctagctactcaggtgggaggatcacctgagcctggggagatcgaggctacagtgagccaaaagcatgttactgcactgcagcctgggcaacagagtgagaccctgactcaaaaaaaaaaaaaaaattaccttgaatttttctttaaaaaataaaacatatttagaactcaggttttctctcgttgaattctaagtcctattactcagctgagtttttttatggccttgttgaattgtcaacagagacagtggattactgattcatcaagtatatattctctgtagcaggaaaatggaataaggaatgtacttgcatttccacattacctgacaccatcattttaactttattcattaactttattttacggtgtgtgagactcaaaacaaaaatctgccattagttccagtttggctccaaaataaaatattactttgttcattcattttcacatgttgtattaaagtgctgtcactgggctgatgctatgatcctcaccggagggaaatggatggagcacattctatggaggacatagagagaaatctggagcataaggaaaagggccaggctacgttgggttggacatctcagttgatgatacagggtatccaagaagctttagtttcccacgtatggttaggatctaggtacctggatattgaagatataggaagtagaacataagaaataatttttccagttcacagctttgttttgagaaaggctctgagcaagtaaaaaggagcaaatgcttatctgagtagaacttcaacggtatggcttgtgatagccagtctcatgcaggtacgtccttgggatttaacatatacaggctgggttcagtttagaggattctctagcaatttgagaagccaggaaaacctctcaaaccccttagacccagacagaaagaatcaatgagggaatgattcactcaatgaataattaccaactggagtgaaggattctctagtctagtgattctcaatgaataagcattataccatctctgtcagaaatgtatgtatgttaaaatgcagattcctgggccctacctcaggctaactggagcaaaatttctatgaagtggggtctaagaatatgcatattcacagatatgctagaaggttcttattcatatttacagcagacacttatccttggggatatgtcaaaccagccaagtgggaatgaaggtaaaactttgagcctacagcacaaatgggctgagatattttgggtagagcttcttcttatggataaaacaatagtcacatgagtagcaaaaggcttcataaaatattttgacctccacaggtgacataactttcttttgttgtcaactcctgatttattttagagaaattttgtttttaaaagttctctctgatagataaatgtgctgaggcactgagtgtacttttagttcttgcattgggatgtaatctaataaaataaaattccatgcagctatttggatgacatctgtttgaatagcatagtggggcaaatagatttgtgtctatgtatattatttgtgtgttgtattattagcaaatatgatagtgttagcaaatatgatagtattatcagcaaatatgatagcaaatatgatatgatagttgtatgattagcaaatatgtatattatttacgtgttgtattattagcaaatatgatagctttaataataatctaatattaatttatactacttaattttgacaaagaagtagaattgaagtagagatttgatattaaaggcatttatccatctgctttggagtggcaattggtatatagacaatgggctttagattcacataaatgttggtctcaccttttccatttgctcattgtgtgaccttggcatattatttagcttctctgaatctgtgtttttttaactacaaaaagaggacaatagtacattacttctatgatatagaaaatcacggccgggtgtggtggctcacgcctgtaatcccagcactttgggaggccgaggcaggcggatcacaaagtcaggagatggagaccaacctggctaacatggtgaaaccccatctctactaaaaatacaaaaaaaattagccaggtgtggtggcgggtgtctgtagtcccagctactcgggaggctgagacaggagaatggcatgaactcaggaggcagagcttgcagtgagctgggtaccacagcgagactccatctcaaaaaaaaaaaaaaaaaaaaaagaaaatcactttaaggctgatatatatggtggctcacacctgtaataccaacattttgggagcctatggcaggaggcttgcttgagcccaggagtctgaggttgcagtgagctgtgatcgtgccactgcagtgcagtctgggtgacacagtgagactccgtctcaaagagaacaaaagaaagagagaaagagagagagaaagaaaggaagaaagaaaagaaagaaagcaaaaagaaaagaaaagaaataaaaaaagaaaaaagaaagaaaaaagaaaagaaagaaaggaaagaaagaaaaaagaaaagaaagaaagtaaaaggaaagagagaaatgaagaaaatcagtttaatatagtacttggaacatatcaaatgcttacaaaatttagtgcccttcattgcactggagaagagttaggtggcattttgtagctccgtatgctcagatacagtttgtttttgagctgggaatattttagacttcatcttttctttcttagtcctataattttcctttattcataatgcagtcatccctttcccacccatggaaacagtgaaatgtgggaccagccatgctatattattaattttgcaaagcttgctgacagtgacctctccagcagtagcattcactcttttgccttaaaaaatttcccacaaaagctctccactaggcataagcattactcttagtcctcccactgcttcagtgtggcacagtcatcagtaatatgtagatttccactttggctagggtctatttctctgctttgctcagaaggtaccactgacctttctgattagctgagttgcagatgactgagcttgcacataaaagggacagtcagaaaataaatcttccctgtgtctgtctagacagactccaagagtcaggaaaaattctgctgaaagtccataaatcttccatctttcttcctgaaagcatgtacgagaacagttctcctgtcactacgtatgagagcattcctgaatgtgtgggtagggtttttgatgtcaattttttttatatcaactggtaaaactttattttacaagcaacaggaattggatcaaatgattattataatccagaggaaatattttggaaccacagcaaatgccattatacatactgccaatacagatttaatagacaatactgaactgtacaagagttatttatttttccttaatctcgaagctatttttagtaatacaaaaaagccatattaacatttttttcccgttagaaaacatgatgtacaaaactttggatgaaaagataagtcaaatttcgtttaatcacttggaggaaaatccaccaactctctcaataccacctttcactcgcgtccgtgtgaagagaccaccaaacaggcgttgtgtgagcaataaagctgtttatttcacctgggtgcaggcgggcgggctgagtccaaaaagagagtcagcgaagggagataggggtggggccgttttataggatttgggtaggtaaaggaaaaaggggggttgttctctggtgggcaggagtgggggtcacaaggtgctcagtgggggagctttttgagccaggatgagccaggagaaggaatttcacaagacaatgtcatcagttaaggcaggaacaggccattttcacttcttttgtggtggaatgtcatcagttaaggcaggaaccggccatctggatgtgtatgtgcaggtcacaggggatatgatggcttagcttgggctcagaggcctgacgttcctgtcttcttatattaataagaagaataaaacaaaatagtgtcgaagtgttggggcggcgaaacatttttggcagggggtggtatggagagagagaatgggtgatgtttctcaggattaggggaggcgtgggaacctggagtgggagagattaagctgaaggaagattttgtggtaaggggtgatattgtggggttattggaagaaacatttgtcatgtagaattattggtgatggcctggatacggttttatatgaattgaaaaactaaatggaataagagaaggagaaaaccaggtattaaagttctaagaatggggaggacctaggacatgtaattagagagtgcttaaggagatttagcatagttctgccagcaaagattatttatttaagagttaagagtggcagtttggggatagcaccaggagatatcagctgtgatagcttggagaaacagtgtaaactggcagtgtaaacaagagcagggcacgtatgagtagttgagaacagtgaacaggagtatgactagacagaagatagtagggatgacaagtttttttggggcacagtcttaagttggtctggtgtctggaataagactggggcctaataaaaaggagcgtccatacaggagcttaaatgtgctgtaccttgtaggattccgaggacaggcctgaattctgagaagggaaagtggtaaaagtactgtccagttctttttaagttggtggctgagcttggtgaggtgtgtttttaaaagactattagtctgttctaccttttctgaagactgaggaccgtaaggggtataaaggtttcactgaataccaagagcctgaaaagccggtctgctattggactgtatagaggtgggaaggccaaagcgaggaattatgtgtgacagaggggaagaaatgactgcggtgaccttttcagaccctgtgggaaaggcctctacctatccagtgaaagtgtctacctagactaagaggtattttagtttcctgactcagggcatgttgagtaaagctactttcccagtcctgggtgggggcaaatccttgagcttgatgtgtagggaagggagggggcctgaataatccctgaggggtagtagaatagcagatggaacactgagaagttatttccttgaggatagatttctacgatggaaaggaaatgagaggttctaagaggcgggctagtggcttatactatagcatagcctgcctttgctggtgtggtgattaggcctggtggaactgccatcaataaactaagtgtgatcagggtgaggaataggaaagaaggaaatatggggaaatggggtggaatgtcaggtgcatcagagagatacagtcataggggtcaggtgtggtatcaggaataatgtgggaggccggattgaagtccggaccaggaacaatggtaattgtgggagactcaacaaagagtgagtacagctgaaggagctggggagcagaaagtatatgcgtcaggtgtgaggaagaaaatagctggggagcagaaagtatatgcgtcaggtgtgaggaagttatgagaactgttgagagtgagttgagcatagtttgtgattttaagggcctctaaaagtattagggcagtggtggccactgcacgcagacttgagggctaggcaaaacagtaaggtcaagttgtttggataaaaaggctacagggtgtagtcctggttcttgtgtaagaattctaactgcacaggcctgcactttggctgtgggtaatgaaaagggttgggatttgtcagggagagctagggtgggggcagtctctaaagctgtcttcaaggaacggaaagaggaatggggaaaggatttaggatctatggggtcagctaggtttctttttgtgagtttatataatggttttgttaggatagcaaaaccaggtatctaaagtcgaaagtgtctaaccatgcccaggaaggaaaggagttgtcgttttatagctgttggggtttgagatatcagctgaacaggatcagcagggagagcacgtgtgtttttatgagaattacgctgagataggtaacagctgaggaagaaatttgggcttgactgaagtaatgggggctgtctgtgaagcttgcagcagtacagcccaggtaatttgctgagcctgatgggtgtcagggtcagtccaagtgaaagcgaagagaggctgggatgaagggtgcaaaggaatagtaaagaaagcatgtttgagatctagaacagaataatgggttgtggagggaggtattgaggataggagagtatatgggtttggcaccatagggtggataggcaaaataatttggttgataaggtgcagatcctgaactaacctgtaaggcttgtctggttctaggacaggtaaaatggaggaattgtaaggagagtttataggctttaaaaggccatgctgtaacaggtgagtgataacaggctttaatccttttaaagcgtgctgtgggatgggatattggtactgagcggggtaagggtgattaggttttaatgagatggtaaggggtggattataggtcgctaaggagggagtagaggtatcttatacttgtgggttaaggtggggagatataaggggaggatgtgaaggaggctttgaactgggggaaaaggtggcaatgaggtgtgtctgtagcccaggaatagtcagggaagcagataatttagttaaaatatctcggcctaataagggaactgggcaggtggggataactaaaaggattgcttaaaagagtattgtctaagttggcaccagagctggggagttttaagaggtttagaaacctggctgtcaatacaacagttatggaggcaagggaaacaggcctttgaaaagaaggtaatgtggagtgggtagcctccgtattgattaagaaggggatggacttaccttccactgtgagagttacctagagcgtctgtgatggtcttgtaggcttctgaggcaatccggcagtatcagtcttcagctgctaagctgagaagatctgggaaggagtcagagagccttgggccagagttccaggggctctggaagtggctgccaggtgagttgaacagtccgattttcagtggggtcctgcacagatgggacacagcttaggaggaatcttgggctgtgggcattccttggcccagtggccagatttccagagcttgtagcaagctcctgggggaggcaggcctggaggaatgcctggccactgaggtttaggcgtttagaagttcttgtgtgctggagatgtggctggggtttgtctcatagtggaggcaaggaattgcaactcagaaatatgttgctacttggctgcctctactctattattgtacaccttgaaggcgaggttaattaagtcctgttgtggagtttgagggccggaatttaatttttggagttttatttaatgtcgggaggagattgggtaataaaatgtatattgagaataagacggccttttgacctttcagggtctagggctgtaaagcatctcagggttgctgccaaacgagccatgaactgggctgggtttttatatttgatgaaaaagagcctaaacgctatctgatttgggataaagaaaaaggagcattaaccttgactatgcctttagctctagccacctttttaagaggaaattgctgggcaggtgggggaaggctagtcacagaatgaaactggaagccagaccaggtgtgaggaggggaggtgataaaaggattatagggtggaggagcagaggctgaggaagaattgggacttagcctggcgaggaggggagaagtcagatgagtctgtagaaaaggactattagaaagactcagtgacacctggggttgggactgaggggacaggcaggagggaaagaaggaagatttgggactagttgcattgggaacagagactaaggagggattgatgtgtaaaagaatggctggacgtcaggcacctcagaccgtttgcctattttatgacaagaattatttagatcttgtaggatggaaaaattgaaagtgccattttctggctatttggaactaccgtcgaatttgtattggggtcaagcagcattgcagaagaaaataagacgcttagattttaggtcaggcgagagttgaagaggttttaagttcttaagaacacagactaagggagaagaaggaggaatggagggtggaatgttgcctatagtgaaggaggcaagtttaaagagaagggtagagacgtggagtaggggatggggagcagccaaagcaggcatccccgcaattgacttgccaccaagggaacgtgggtgaatgaccaaggcaggtgtccctgcggagatcagacaccaatggaatgtgggtgaataatcagagaggcatccttgcaatgattaaacaccaagggaaggctgccttcccgagtccatgaccggcaccggagttttgggtccgtggataaaatgtgtctcctttgtctctaccagaaagtgaaaggaattgaaattaagagaagggagagattgaagtgtggtgccaagattgaaaggagaaagaggttgagagatagtgagggaggttggagaagagagtaaaaagaggctgcttaccggatttgaaattggtgagatgttccttgggctggtgggtctgaggacccgaggtcataggtggatctttttcacggagcaaagagcaggaggacaggggattgatctcccaagggaggtcccccactccgagtcacggcaccaacaccaaatttcactcgtgtccatgtgaagagaccaccaaacaggctttgtgtgagcaataaagctgtttatttcacctgggtgcaggcgggctgagtccgaaaagagagtcagcgaagggagataggagtggggccgttttataggagttgggtaggtaaaggaaaaaggggggttgttctctggtgggcaggagtgggggggtcacaaggtgctcagcaggggagcttttgagccaggatgagccaggagaaggaatttcacaagacaatgtcatcagttaaggcaggaacaagccattttcatttcttttgtggtggaatgtcatcagttaaggcaggaaccagctatctggatgtgtatgtgcaagtcacaggggatatgatggcttagcttaggctcagaggcctgacaccacccaaagtgttttatgcagtgaataaaatcaaaataatgcatcttaataaattccagctgttaaaagaacaaacttagcaatatataacagtttgctacgcaggatttttgactattcactttgggagttattttttaaaatccacttttttttactgagtcttactacatatcaggcactggacttggccatctaggtaactaagaaaaagttggttaagataggaaagacccataaatcaatcctttgattaccaaatgcaatttttaactttcaaacatccccaagatcaagaaaccctaactaaaaatacatacccttctaagtgttatttgattttattagtagcaagggtgtttggtaaggtcgtgaacctctatttttgatccattattccaattaaaagcatgcgtcaaaagctaatttgttatttttctaatgtgtttaagatttggcattcagtttttacacatgtggttcagtgatttatcatgaaccctaaactgcacactgctcaaaaacagcaacacagatgtgcgttacatgaaataatggtttttgatacatatcttcaaattcaattcagtttagggtccagtgaagaaaaagatatccagttatcgggtggtaaagagcagaggaggtaaactagttaagattattaatatgcagtgaagtgttattgtctatcttatcctttgagtaacaagatgctaacacgctttcaagaaaaaactgcttaaaactatgctaaaggcccatgcattgacatcatccattcaacaccgttactttgttacataaaacggttttcttaaggtgtaacatattaggcaataatttggaaattagccaagcactaagcaattataatagcaggtaatacaccatcaatttttgaaacacatttggccacatttcacaatccatctgcagtatggattctatagactctcactcagtttaaaatttgtttctggacctgaatgacaggagaatggctttatgaaattttctcataagacatttaagtagtcttaggttcacaacccttttgttgtaaatgatttaatctgacatgccatataactacaatacaaataattatgttcaattcttaaatgaaaactaaatgccaataaatggtaacagatttgacatggaatgttctaagatcttcctctacataatctgccatggcagattatgaatttcagagcttgaaaacttcagattaagaaccacaagaaaatttactcttgatggcatacaagatcttcctaaaaattaacctaagacctagaagtctcagtattattagaacataaagaaacgcaacaaatctgtatattttattcacatatatttttgtttttagtgtgctcacagaaaattagaacaccttaagtaggagtttaatagcaatttttgtaagcaaagttacattccatctctaagtcaaattggtcgacgcttctccagcatttacaaaacatgatagacaagatgctacacaaaaccattgcatctgaagattttttttttcctttattctcaaagatgactggaaaagaaagcattatctgctgtaatcaaaaacataccacagtataaacagtaaccattccgcttatcacagcttggttgagtttaaaatttgtgtttaaaaggtccaagatgactgcagttttacaaaaatgggcagggtggaaagtcgcaaacttcatgtgcttctggatatcaagatttgtttttatacaatagtcacagttaaaaacaccctgctggtaatacataattacactttattaaggtcataaaccagcaataaacaatacagcctatataacttgtagttctacttaatcactgactggtacacctaacatgagataagtgaaaagttcctatggtttaaatgaactcctaagactatgatcatttttttttttttaaatatgggtattggtgttttttcttttttcctctttccttcttagtcaagacttgtagtgttgtaaacctgcctcacaaaatacatggtaataacttttcttaaaaaaaaagacagcctttacaccatttctagtggcacattattttggcaatgttatgtaccacttccatttccccattgtgacccctatcacttcatttgatatccctttttgacccacccatctctttcatatatgggcatatccatagattgacaaaggaagtttacatttttggataaagatggagagtatgcaaaaacattaatactgatgcaaaaaaataaaaaaatagaaacaaggcagaggaagaaggtgtttaagctctcctcgacctgttggaatggtggttaacagaatgatttgagatgggatctgtggggaggggagaaaaaaaacaaaattttgtgcttaaaaaaagtaaaagattgatgtcaaatatttgtactaagattgcgggtggcaagagttagcatcctgcagttagaagcaaaattagagatttggactggtcaaggacagcattgatatgtgtggggtatgtaaatcacccaagctctgcaaaagtactgagaataacttgtattttccagactgaaaacctaccatgatggggagggattgaagtgggccctggaacaactccggaatacattacaagcttaaggggagagcaaggaatttagaccatagagctcatcattcatcattttattccacataaaatgggtgtttcagcatgtccaaaagcatagataaggaaattgagcttcccaagaagttaagccagttgtttgcagttagagaaagcatgtttttatgaagctgtcctacccaggagcggggaacaggtccctgggctctatgaccatggaaatctctagatgagtaaaagaaagcttggcaaaaattgggcaggatcctcaaacaaagattgagaaaggcttttctcatctgtgaatcagagttctggactttcctgaggatgagaacagctgcatggctgaaatgcagcagcccagagcaaagagggtgctccctggggggtcacagctggtgaagactgaaaatccagatcctaaaattcaaccagacctatcataccagcaggccaccacgaaatgactgcaggtttcactggagagacgaggtacttggcctgcgaattgctttctatgtcctagacaagtaattgcgagtaagccttgagatagcaatttgatagtctttgatagcaatatgacattgctacatccaagtgtgggagtcagtacacttatattgcgcatatcttggacattttaggtttcattttcatttctttttaccgtcaaactgggggaaagattggcccttcatcccagattgtatttatgctcatttttgttttcacccctgcccatgcccacccaaccacactcctgtccatcctctccctcgctactcatatacccctgggaaaagctcactgcatttagatcccaggttcttctcccccaaggcacatcgcttaacattaatgctgggtgctcacttgatggcaataacatttcttttgaaattttcaagaatatgactcttcaagaagcaacaactagaaataattaaaagttcacatgactgtcagagaaaatatagcagaggcagtagcagtcctcgctgagaaacccagggagcaactggttgggctgagaaggttcgtgaggaatctttcatggagaaaattattttgccaacagttccttgattattatttaatcatacagttggctctcttgtgttcctttaagatctgtgagataggtacaaacaagattttatattcaatagcttatacctgtaagcagtacaggcttttaaaagattggacttttaaggcaaaggtaattggtgtgaagtattagccacttaatggaaaatgataaaatggtacatgtttcaatcagaattatgagctgtgctcgacgtggctgtttgtagctgaagttcactgatttctgtacaatgatgaatttctttgtggcagctaaactgctcagcctagagttacacaatcttcaacgatgacgtttccaccctttgcttgggtcattgaatgtctcaggaagaggcatgaagaagaatgaggagctcgacccacctggagatgggtagacatgtttgctgagctatcagtgaattgacgcatccaaggatgcttttctccctacaggaataatctcccgtcatgtctcaaacttctctccatctcactagtgaggatgaatgctgtcttcctctagggtagtggaggacaatcaggtcactgccagaagacagcttttcacactctcgctttcctcgagagaatgttaaactaattggagtgaggcatgaaaggatgaaatttggccaaattggcaggtgtgaacgtcctttcttcacaccaagtagagtcaactggggaaaatgatggtgctgtcctgatgtgagactgtttctcatagcacggtgctggccactgcatgacactctctaccagcagagaagtggagtgctactgtgaaaagaactgacggatatgatttggttctgggaagtgagttttgtaacaccatgctggaaactaactcattagctgtgatcttgcaaaaattctggcattctgagataaagcaatttgatcaccagtatgtcatataaagaggttttggagtagctttaaaagacacagtagatcaatatgaaaatgaaatgtatccatctaataagaatattcctcttggaggagccagtaaaagtgtgtgttcttgtgcctgcctttgtgtgtgcagacacgtgtgcatatgtgtgtatgtgcagcatacatgtgtgtggtataaagaaagaaaaaaatcttgttgcgtaggaagagttgtgtagagcctactaaaaattatatagccaaggcatgtctcttaattttggaactactaggtgttaaaaagcaaaggaaatgaacatcagagcaagtgaaatatgagagccagaaaatatcaatgtgagttttgatatcaatagaccaatgaattgccaatgatgcagaagagctttatgagccttggcaggcaattaggtaagagtagtttcttctggagtggcaatttgaagtggttattaactatatactgaaatttgacgggctaaagaacccagttaaaaagaaaaccatccatatcgaattgttccctctactttgtttaaaaaacaaaaaacttcatgatgagctgaagtaagagatttttataccaaacaaagatgactaaactgaaagtatgaaaccttctatttttagtgaatcctgacattctctactgctagcattcccagcttccagataatatgttctccagttggctggttattgtgctgtaaatcacatttcactatatcagcaaacgatggcatgaacttgaagagcaaaacaaaatcagcttggaaaaactgacataaaacctctaaagtctaaaggtagtcccttcccttagaaaatgactggattgattacaattgcattgtattatcaaatatgtggttttattttaattttgtttactttttatttgtttactttttgagagataggatctcactatgttgcccaggttggtctcaaactcctggcctcaagtgattcacctgcccttatctcccaaagtgctgaggttacaggtgtgagccatggcactatttttaaagattaaaatatatttaaacaattaaattccaagtgaagaaaaacatagataaagtggaaggtgattaaaaaagcaagtgtttgctgcactctgtttgctgttcttttctctgttagttgctgaatcacacttatgataaattacatttacaattcatttgaaaataaagctaaatatcaagttttgggatattagaaagtagaggctacagagaagtattcttatctaaatcaataggaaaagtagaatttttcccattgctatgtgataacatagcttatcactagccaatttctcactatctgcataagattttgccaatggacagaaatctgcttccttactttctgtgtcaatcaaaaatagtatcctgagatattattttgtgtttcacagactagaaatttttagcaacctgaggacatgtgacttgaaaacatgagcagtgccaagaattatattctcttccagttttcatagctaaagggagttagagttgaacaattcccagaacagcacagaaagctagaaaatattaaatttacaggctaaggctttgccattgaaagctgactatggagatttttagggtaggcaggaagaacaacacaatctagaagtttgggatcttgctatatttccccttcactaagacttttctaagtaaatagttaattaatatcccaggatctcaatttccatatctgtaaagtgaaagatttgaatggataaactataaggtctctttcaaataaaaaattttatccttgtatggcactctccataattacacacatgtataatctaaccctatggaactacacattaatttcccaagtgtgatatttatgatctcttctgatggttgcatgccatttgttaacgtgactttgacctttcctggtctgtgtggcagctgagctactactgctatatcctgaaccagggctttggctaagcagggatgtccaagtgcattccttatgacccagagaggctcataattccatacaggaacattcatgggaccttgaagaatttatgtttgtgttggtaaatttctcttcatggcctccttgagagcaatgaaagaagtgtattttctgacagctccaacttcttactgcctgtgtttgctcagcattatttcagtcataggtgtccggaaccccagaaagtgcaaagacatcctcacagctccatgaatatatgaccaatactcttcagaggggactgaagatggattagcactttgtaggtagaggttcaaatcccaattgcaacagcaggctgtgtaaccttgggaaatttgacctctctcctttgtaagtgggcacaatggataacatgagaccatatttgtaaatcacctgatgcggtatggcaggctcaaggagtgttgtctttgcactgcccttccatgctgtgtttatcctgttatgaataaaatgaattcaacctgttagactgtcagcgccttcataactggccttccctttcggcttgaggcatgccatctgccgtattttgcaccaacttcaagaacataatgtacttacaaaatacttgtcagtgtggactctgaatgaatttttatagcattaaaaacaaaaacagacaatcagagcaaggaacaagaacaagccatttacaacagaataaacacaaatggctaatcaatatatgaaaaattggtccaactttatcctcagagatccacaatttaaaaaaataacagcttcgagataatttacataccatatgattcgcctatttaaagtgtatatacttcaatggtttttagtatgttcacagagttgtgcaaccatcatcattaattttaaaacatatttattacccccataaaaactcatactcattagtggtcattccctttttttttttttttttttttgaggcagagtctcgctctgtcgtccaggctggagtggcaccatctacgctcactgcaagctccgcctcccgggttcacgcccttctcctgcctcagcctcccgagtagctgggactacaggcgcccgccaccacgcccggctaattttgtttttttttttatttttagtagagacggggtttcaccgtgttagccaggttggtcttgatctcctgacctcgtgatccacccgccttggcctcccaaagtgctgggattacaggcctgagccaccgcgcccggctgtggtcattccctttttatcccttaatcctttccttccccttaggtaaccactatctactttctgtctatagattttcctgttctggacatttcatgtacacagaatcctacaatatgttgtcttttgtgattagctagttttgcttagcaaattgtttccaaagtttatccatattctagcacattcactttatgcctttttaaaaaatttggaatttgtttttttattttttaaattcatataagatatatctaacataaaatttgctactttaaccactttaaaatatgcagttcagtggcattaattatgctcataatgtcatgcaaccttcgcggctatttccaaaacgttttcatcaccccaaacagaaactacaaccattaagcaataactttccattcctccttcttcccaggggttgataacctctaatgtcctttctctctctatgtatttgcctgtcttagatatttcatataagtggaatcatacaatatttatccttttgtatctgttttatttcacttagcgtaatgttcaagtttcgaccatgttgtagcatgtatcagaacttcatttcttatgaataaatataccatattttgtttattcatctgttgatgaacacttgggttgttcctaccttttggctactgtaaataatgctgcaatgaacatgggagtgcagatataccttcaccatattgatttcaatttcctctggatatatacccagaagtgggattgatggatcatattgtagttctatttttagttttttgaagaaccttcatattattttttatagtggctgtactaatttatattaccaccaacagtgtataagggttcccttcactttgtatccttgccaacactcatctttcatctttttgatagaagccattctaacagatgcaaggtgatatttcattgtgattttaactagcatttccttaatgatcagtgatgcttagcattttttcatgtatctattggtcatttgtatgtcttttttttttttttttagaagtgtctgttcaagtcctttgtccatttttaaatcaggttgttttcctttcattgaggtgtttgagttccctatatattttaggtattaactccttatcagagatatggcttgcaaatattttctcccattctgcaagatctacggcttcaatgcaatcccattaaaattctttcattttctgcagaaatagaaaaaacaatctttaaatttgtatggaaccacagaagactccaaatagccaaagcaatcttgagcaaaaagagcaaagctggaggcatcacacttcctgatttcaaaatattttaaagtgattttaatcaatagatagtactggcataaaaacagacaccagtgaaataggatagaaaacccagaagtaaacccacatactcacaattgattttcaacaacagtgtcaaaacataacattgggaaagggcagtttcttcaataaatattattgggaaaactggttaaccacaggcagaagaatgaaattggatctgtatttcacactgtttacaaaaattgactcagaataattaaagagttaaatataaaatctgtctttttgattaaagccatcctagtgagtgttaagtagtatctcattgtggtctgatttgcatttccctgatggctaatgatgttgaatatcttttcatgtgtttattggccatttgtatattcttaaactgttagtggaagtgcaaattaactttaaaaagccactcactttggaggacagtttggcaatttcattcattttgagccaacaaacccatttgtgggaatttaccttaagaagataattacagaactatgaaatgatgtgtgctcaagttattgcagccttcttttacaataaagaatcggaaacatactctgtagaagttttaaaaaatagtaattttctgatatacacaaaatgatgtactatgcagccattaaaatgatggtatggaaataagtacttcacacgtaaaatacctataatatacaagtcaaggattccttatccaaaatgcatgggatcagaagtgttttggatttggaattttttaagattttggaatatttgcatatacataatgagacttcttagggatggtacccaagttcaagcatgacatttatttatgtatcatatataccttatatccatagcctgaagttaatcttatacaactttttctttcttttttttttttgaaacggagtctcgctctgtcacccaggctggagttcagtgctgcattaagctcactgcaacctccgcttcccaggttcaaaactctcctgcctcagattcctgagtagctgggattacaggtgcacgccaccaggcccagctaatttttgtatttttagtagacatggagtttcaccatgttggccatgctggtcttgaactcctgacctcaagtgatccacccaccttggcctcccaaagtgctgggattacaggcgtgagccatggcgcctggcctatacaatattttaaataactttgtgaatgaaacaaagtttatgcacatttagccatcaaaaagcaaaggtgtcactatctcagccacccacgtggacaacctgtggttgtttggcatcaccatcatgcctgactgaatttatatgccaccaatgaacaattattttcttactcttatttatacatgagtctctaatagtaaagacaatgacataccatcaatacagtgaaaaaatactgtgttcagcatagctaagcagaacagtagcatcaccagaatatctgtatcagctgttaaacaatagcagcaatgaacaacgacaggctttcagtccccacttgtgacctgttacgtcaggtcagatgtggaattgcccgcttgtgacatcatgtagttgctcaaaacgttttgaattttggagcattttggatttcagattttcagtttaaggatgctcagcctgttctgttgaataaatagtgtgtcacagagtagcatgccattttaccttttgtcttttaccactttcgtgaaaacgttcgccttcttctctttgtatttgtgtacataaggagatgtacagcggatgactggtaaaagtgaacagtgtttacctctaggtgctggaatttgggatagcattttgtttttcctttgagattttctctgctgttagaactaaagtaattcagcctatatcaaaacaacaataataaagttactttcaaaggaagaataattttgctctgaactgtgcctaccactatctccccttactattgaggaccacaccattttgaccctgaatttctactttcaaaccacaagagaatcccaataaactatagtaacatggagaactggtgtaagaaaaacacaggagcttgttttcattgaatttccttgcaataattacacgagtttaattaaaacaaataaattagaattgatacactggaatcaatatgcaaaaaacaaaatgtgcttgttttacgggtcctaataggattccaagcaggaaccattttctagcatttatttctagcacatctatctttgaatggaaatttgtgggagatgatgagagaaatctaaacatttcccattttggtgcttatcatcagcccagaaggtttagttcatccagtcttgttcagaattgttcatgctctgtcatgcctgtgctcattgatgtggttggctccgtgtccccacctaaatctcatctccagttgcaattcccatgtgtcaggggatggggcctcgtgggaggtgattgaatcgtgggggtggacttcccccttgctgttcttgtgagagtgcgtgagttctcatgagatctggttgtttgaaagtatgtggcactcctccccttgctctctctctcttgctgtcagaggtgattgaaccagaacaactccattttgagtaggggctgggtaaagtaaggctgagacctactgggctgcattctcagacagctggttaagctttctaagtcacaggatgagatgggcggttggcacaagatacaagtcataaagtccttgctgataaaacagattgcagtaaagaagctggccaaaacccaccataacaaagaaggccacatgagtgacctctggtcattctcactactcattatatgctaattataatgcattagcaagccaagagacgttcccaccagcaccatgagagtttacaaatgccatggcaatgtcaggaagctaccttatatggtctaaaaaggggaggagtactcagttctaggaattgcccatccctttcccagaaaactcatgaataattcaccccttgtttagcatataatcaagaaataatcataaaaatgggcaaccagcagccctggagtaaccattcttttattacttgacattcttagtgaacttgctctcactttactctatggattcaccttgaatattttcttgcccaaatccaagagccctctcttggggtctggatctggacccctttccagtaacactgccaccacatgaagaaggtgcttgcttccccttcgccttccatcatgattttaagtttcctgaggcctcccagtcatgcttcccattaaacctgcagaactatgagtcaaacctcttttcttcataaatttttatagcagtgtgaaaacaaactaatatacccaggctgttccacatctggctaaaaagaccctctgcaccttgaattgctagacaaatcccattgttctaccaagactggctttgattcacatctatgctcccaatactgtgtaaaaactgcctggagatctgtttcttgcttatctatcttcacatctccagagctctgtgcctggaatactgtgagcactgtgcctggaatattggcagcactcaataaatgtttgttgagtaaatgcatgcatgtgtgcatgcaggcagtggtcagattgtaaaaggctttataagccttttacatgctaaaagggaatgctaaagaaagggaaatcaggccaggtgcggtggctcacacctgtaatcccagcactttgggaggccgaggcaggtggatggcctgaggtcaggaattcaagaccagcctggccaacatagtgaaaccccatctctactaaaaatacaaaagattagctgggtgtggtggtaggtacctgtaatcccagctactagggaggctgaggcaggagaatctcttgaaccttgaaggcggaggttgcagtgagccaagatcgtgccattgcactccagcttgggcaacaagagtgaaactccatctcagaaaacaagaagcggaaatcagagtcagtcacaggagtagggtcctatgttgccttagaggtagtgtggctgctttcttgatgtcctctccttactcgtacctgcccagtcttgtagctttcagtatgatccacaaattcaacacacacatacccccaccacgcccaacatacacacatatacatacataaatacacaaacaacagaaaagaaaatgtcaccacatatttcacatgaccttagttctttgtttaaatgaaaaaaaatctcataattttttctcactgaaaaatgaatatatagtcaatgtacactagactatagaaaaaagtacaaagaagaaacatcacttgatatcccattatctacagatgaatggttagagttttgctgtcttttctatataggcatatatatttacatatatatgcatatatttaagtggctgataagacaaaaaataaaacaattaaaggagatgttcttttttcttgggaatatcagttgaacagactgtacattttgtcttttgtaaatttaaggctagctagaaactcttacacttgggaaaaagaagtattcacagatctttgtgtttttgtgtggcttttactccccttttactaatagaattttttttttttaaatcaagagtaaacatgaatgaagggttatagattttggaaagacataacagaaagcagctgcctcatgcaccctctctcttcacttctaatcctgttcaccaaagctaaggacattcaaccatttgcactttttttcatatgtatctccttatttttaaaggacatgcctatattgctattctggatttttcatttttagtagttatctattcttaccatggaagatgaagatttcattctcttacatgccccctccccactcttccaacccatgttccttccttatgctccaaatactgttcatcatcatttttgttcagagtagactgttgaagacattgtttcaataatcttctcattttatttacagttaagctatgtgtcatttaatttttcttgtagaacattttgtttttcctggagtttataattgtgttattttttagtttgtttgtaagtatgtttatttagatactgagaaaaaaatttactcgaattttaccagtgccaatacctggtttagggtagaatatttttgaaaatgacctacaattcctagtaaattgcttgagcaattttctggtagaatttaacaagatgaagagcccactttagaggttggatttatctgcccagctaactgtcgtcagccttatgatgagcttcataaactttagccagactttattatacctagtctaacaaagtcacctagccagctttctttctctttaaatgtctctaccagagaaatcttgactggctttatcagaagcctttgctcttgcagcaagtttgacataaaatattgacactaaccagtaaccaattcgcttggaaagttccttcagctatgttcatcattaattcttccacttagtttccccaagaagtggaaatggcctcccaataccttaaaacacattgggtaatctctacatttcattctttccttgaagacatccttcttggagcatgctattttctggctgcattgtaggttgatgagtctctagacttgctgcacagagatcgtcatggggacttcttttgccatcttcctgggaattccctttcccctctcctagattggatgaagagttggtctcatgggggtctgtgaccgttgcaatcgcacttaccagggctctgcatttggcttagcactctgctgttgccattttgaaattcttaatagctgggcacggtggctcacacctgtaatcccagcactttgggaggccaaggctggcagatcacttgaggccaagagtttgaaaccatcctggccaacatggtgaaaccccatctctactaacaaaacaaaaattagccaggtgtggtggcaacgcacctgtaatcccagctactccagagactgaggcactagaatctcttgaatccaggaggcggaggttgcggtgagctgagatcgtgccactgcactctaggcctgggcgacagagcaagactttgtctcaaaaaaaaaaaaaaaaaaaaagaaattcttaataagttctgaacaaggggccctgtgttttcattttgcactgggtcccgcaaattatatagttgctccttattggactcccaggtttctgtcttttggtttttttttggcaactctctctttttgggggagcacctactctagcagcttcctaagtaatgctgtataagagataagagtttttgaaattttgcatgtctgaaaaaaaatctttatcttaccctcatattcttttttttttttttttttttactttaagttctgggatacatgtgctgaacgtgcaggtttgttacatgggtatacatgtgccacggtggtttgctgcacccatcaactcatcatccaggctttaagccccatatgcattaagtatttgtcctaatgctctccctcccctgtccctaccccctgacaggcccctgtgtgtgatgttcccctccctgtgcccatgtgttctcattgttcaactcccacctatgagtgagaacatgtagtgtttggctttctgttcctgtgttagtttgctgaggatgatatcttacccttatgttctaataatagtatggttcagtatagaattcccaggtggaaattattttccttgagggtttgtttttgtttttgtttttttttgagacaaagtctcatactgttgcccaggctggagtgcagtggagtgatctcggctcactgcaacctccgcatcccaggtttccttgagggtttgaaggcattgcttcattgtcttctgatgtccagtgcttctgttaagaaaacagatgccctttgattcccgacctgtggatacgatctgtattttctctcagttgcagctttgccatctactttctggcaatcaagcttgattgctgttgtcttgtctcatctccttgtttttgcaggtgattatttaaaagtcaccattttagcagtattttgagagagagcagatgtaaacacacattttcaatccgagccacttttaaatgtctgtgttgcttataaagtcagctctttctcttcgtatgtagaatcaggtggtaatggtggggataatttgcataagaagccttagtgccttctggaagacacgaatctttcttttcaaaatttggtggcacatgcttgtaatcccagctacttgggaggctgaggcaggagcattgcttgaacccgggagatggaggttgcagtgagccaagatggtgccgctgcactttaacctgagccacagagcaacactctatctcaaaaaaaaaaaaaagagagaaaattcaatgttaaggaaacctttgctcctgatgagaaagaacacgaaaaactgcagggaaaaattcactattagaaggaagtagactgtattggtaacctagttgtgcctgctggatcaaagtttggctacatgagattgaacaaaagaaccatctccttgttacccaaggagatgtatcatgccaaatctattgtttttgttttgttttcttcaaattattttttccttaataacctggcagtgattcaaaatatgaaaagaagattcagatgtgttctctttaagggggattcgaccatgactgccttacataagcaggatcaaagtccatcatgggactggattccagagaacaatgatggtaagaaggcttcagggctcacagtttgaagagtgttgttacagaaattctctgaggggtagcaggtgcagaagagtcataaaatttaagggaccaaccatggataggctgttgccaggtcatgagcaccttgaagcatctcttgatggccattcattagcctaagtatttgttgtctgggagaactgagcaagatgagctgcacagttcagttgtccatagggtcatgtttcttcagcacagagacctggtctccctgatcattgtgggttatggaaaaacgtgaccacacttaaggcagaagtttcaattccctctgcaatttttcctgcagcactacctgcctaaacacttcacatatatgtcaattcccttccagattctctattgttgaacacgaatgtgtgtggttttaaactattatgaataatgccatcaatatcccaaatcacatatttttgcatattcttcattttttccccatgcacattttacatattgtgttttgccagcatacctccagaaaagttgcttcttcctcagacttagtgtaattttacttaattttttttaaaacacagcaaatataacaaatggaagaaatgacagggtcatttcagcctctttttatttgaatatctgtatttcttaaggttcattttcatctttgatagaattggaatgcatttacaacatgattataatatctgattattaataaatcagaaataaggatgtattttttgttatcactgagatttcaccttcatgtagctctgtacccacttctaagtatattttacaagcatttctctaagaattccaaccatgtgaaagtactctggcaataaaattttaaaagcctctgtttgcactttgtactttttaaaggtaagagaaatttgaggcacaggtgggcagccgagcccttgagagaaagcaacaatagcaccaggtttatcaccgttcaggtaaatgttagaatgtggaatgcttttattatccctgacatagagatccttccagtgtatttagactgaggggtagttttattgtgccaactgtcaaaaggtattgacttcaatgtatgtgggaaaagattggactccagaggcaccgtgattttccttgctctcctggatggtgctgcacagcccacgggggctctggcggctgcatacatgtgcagtaagtgcacctgaaaagaatacatgtgctcaggtgtgtattctgccatccaaatttgctgtacaagctcccttgaagttgactattgatttgctgccaaatgcaagggcaagagacttaatgaacagttggcaacatttatgccaaattatctttaatttttttaagggactatatctttttcaagtagtctggcagtgaacttcagcttcactcattctctcaccctcctcaatatccagttagttatttggcctggcaattcaacttccaaaaatccctctcaattcagtatctcctttccatcctgagctaccgctgctcatgttctagctcatgaatttaatcccaacactaatgaggctccctgcttactggatcttcctttcttaataactcatcactctaaatccattaggtcattgttcttaagaatcttaatggagaaaatattcacaagaggttaacgtaatgcaaaagatggtgaaacgctctggaataaggatggaagcttaatgggaaacaaataccccatcctatttttgcatgtcctctgatctcctgctggggccacccactgccaaaaacaaccaaaagttagagggcaagcaaaagagcatgggtgataccatctatctacaacagttagcttcttagggtacagactaggtggagagataccatggtggggaaaacgacatgtggacgccattcagcacagttactttttctgactctcccaagaagaacgcattttcccctcattgatattccaagagaaatatcattttattggtacctcaactgaggcacctgtgatactatatttgtaaattatttccatgtttagaccttagctccttcagttaagaactatatcttaattatgttcatatctttagcagttagcactatcttgcagacagtggtgcccaatatatgtttgctaaataaaagaacaaatgatggcatagttgtcctggtgtctttaaagaaaataatggctataaagaaatcctttacacctgtaatcccagcactttggcaggccaaggtgggtggatcatgaggtcaagagatgaaggccatcctggccaacatggtgaaaccccatctctactaaaaatacaaaaattagccaggcgtggtggcgggtgcctgtagtcccagctactcaggaggctgaggcaggagaattgcttgaacccgggaggtggaggaggcagtgagctgagatcacgccagtgcattccagcctggggacagagcgagactctgtctcaaaaaaaaaaaaaaaaaaaaaatcaggttagctggagtcagggattaggtaatacggaatgcagaaatagtgttttcttacttagatcatgagcataaaagcactttgtgagatataatgctattcaaatattactagcatcatttccattattctggattgaacataagaaggaacaaaagagaaacaacaaatagcagtcaatagggagaatgttaaatcctttggtaatacctattacatggagaaagttaaaacagacaaacaaaggtccttattcagctaggaatggtggccagatcagggtcattgaagtctagtttcttttctaaccctgacttgctttgcagtatttggtaaatcacttaacctttctgcggtacagtttttccaatccgttaagtgtctattatagtactttctccttactctcgtgcaaggatgtttgggtgattcatttgataatcctgtaaagtactttgagtcccatagagaaagccagggacacaagattttaactgggattattagttagaaagtctttttgccttggttgaatctccgtttttcatttgtagctcacctgcttttctgtggctttcccagttccatccttgttcctgtacacaactgtgagggtgtaatgataaccaattatatatcccaaatgatggggctatcattagattaactagttgggtagatgtagaaaaattagaaaagtgagaagattttcagcttgtctgcagatgactaaggaaaacacttagagtgggtgcagtggagaaagattattagccagtgactgaaatcaattaggaacctaaccaaaatgttgttatgttcgttggcacttgaccatgacctttttgccttcctaaggaaaaataataactggctccaggtttaaagaagcttcatagtttacattgcttgatacattaaattttgaatacgttttgatattggtccagttttacaatttccttcgaatgacagaacctttacggaggacaatattagcacctctttatggagcaactgaaaaactgcaataatatctccaccatatacttttggaggattgagaaaatgtgtcatcgcttggaattcctaatcttattttattcattcaggttgaggaataatgtaagatattgctccactgtggctttatgaaattttttacttaaaaaaatccaaagcatgtaagtatttatctcatggcttaaatgttcatcactgtaaggagaagtttaagattggaatgtatctctagccttgctctctctccccctgagatctggctttatactttacagcagtaggtttgcaaatcaaaatgccagcttgacctagctgccagaaagtcctgaatatgaatcccacaacagaatttattaattttcctttacaagttggtaatttcttattttctcttaagtaatgctaatttcgggtacacccttgccatgagggaggttctaggtctccagtgttattgtcatacactggcatgtatactgtcatctctactggtattatataatgttgttgctggtacaggctttccccagaatttatagagatggagacaacacgaactaggcatcatcagtcacagcaactcagtttatagttattgaaggaattgttgaaggaactcctgagtcagtctgtaagtgaaatcacagacatgtaaaataaacacttacattttagattatatgatgatgctaaattttctttaagacattggagaattaatgtgggggcaaagaacagggcatgacaggagaaagggccaactgggtccctctccatttacaatgagtattatctattttatatttaatttttatcttttctatgaggcatagttttattaatttcagttatacaccataggcaaaaaaatgttcccagttagagatcctgccaagcatctctaatcaatgttgaagccctggtggaattaagttggttgctttgctttttaatttttttaaaaaaataaatagggtatatgggcttgttgtaaaataattcaaacagcaaaattgcaaagtagatgtcatctgatgtcatagctgttcttcccctagccatgcagtttcactgcttttgaaactccagcccccttttcctaggctagctctgttgggagcctttcagaaatcttttctctgtatacacacacgcatgtgtatgttatgtacatatgtatcaatcatgtctttatttatatcgctgctttatttcagtcaggctgctataacaaaatgccacagattgtagcttaaacaatagaaatggatttctcacagttctggaggctggggagtccaagatcaaggtgctggcagatttggtgtctgctgagggcctgcttccttcatagatatctgttttcttgctgtgtccacacatggtggcaggaagggcaaaaaggctctctgaggtctattttatcagggtgttaatcccacgtgctttgccctcatcacttaaacacctcccaaagctccacctcttaatatcatgattttgggagttaggtttcaacgtatgaatttgggaggacataaacattcagaccatagcaatcacattatacatattgcatgtcaaaccttatatatataagatatatctttttaatttgacaaaaaaggatcactttccaggtactattctgtaatctaccttttgtgctttattatacatcgtcatcatatttctgcttcagtgtgataaatctattgtatttaccctaatggctacaaagtattgtcctgagagatatcctaatttatttttttaaatgattcccaattgactggccttaagttgcttctattttcatagaagcaataattatcataatgctacaataaacattattgtacatataacatttttgcatttggggagagtatgtatattgcaggagaaattcttagaaatggaatttctgggcatatgaattttcaaaaatattgccaaattaaaaaggactgcatatatttactctcccactagcactgtgggaaagccttttttttttttttttttttttttttttgagacagagtttcactctgtcacccagactggagtgcagtagtgccatgtcggcttactgcaacctccgcctcctaggctcaagcgattcttctgcctcagcctccggagtagctgggattacaggtgcaccactactacccagctaatttttgtatttttagtagagatggggtttcaccatgttggcgaggctggtcttgaactcctgacctcaagtgatccacctgcctcggccttccaaagtgctgggattataggcgtgagccactgcactgtgcccggaaaatcttttttattcatgtctttactaccattggtcagctaagccagaagacagatgacagagggctggtctatttttgaatattgacagagaagaatgagactctgggctgggcgcggtggcccatgcttgtaatcccagcactttgggagcccaaggtgggcagatcacctgaggccaggagttcgagagcagcctggccaacatggtgaaatcccatctctactaaaaatacaaaaattagctgggtgtggtgatgtgcacctgtagtcccagctactcaggaggctgaggcaggaaaatcgcttgaaccctggaggcagaggttgtagtgagctgagatcatgccgctgcactccagcctgggcaacagagtgagactcggtctcaaaaaaaaaaaaaaaaaatgagactgatcaatgttgctttgacttcaatttactactaaaacagctagcaagaaagggaaagggtactcgctagaccagtgggtctcaacacctggagcagcagcagtagcaccacctgaaacttactagaaatgcaagttctcaagtcccatcttaaatctgaatcagaaactctggtggcagggcccaggaatctgggtttaacaagatcttgagctgattttgatggtggcccaagttggagaattactgcagtacagcttgatgaaagtgagaatgcagtttcccagtgctttccttatgcctcttggaggtgaacctggagtcctctgctttaggttgaaggtacccagggctttgtactccctgcatctcaccccactggggtggagcaggggacccactgggattcagtgtattacttactttcatataaggcaactcttgttgtcccatagttataaagctctgtgttctgtttcttattgtattacgtgtacgtggacatgccaaacattaacaaatatttggcttcttgtctatctgaaaaatggcccctcatttctatttaacatgaatttctttaattataagtgaagttgagcatcttcttatttttatgggccactttgcacgttttcctcttatttattactttctatatttgtcatattttctattggttggttgtctttttaaaaaagaattaaattgtaacagctgttttaattctaaggaaattagcctttcatcatttgtgttgcaaattcgtttttacctactttgtcatctatcatttaaatttagttacaatacatttttgcatcacagagagttaagatttttatgtagtcaaattgataagtttttatgtgtctgaattttgaattttatgtatgcttagatagatcttcccaaccctaggataattaaaaaaacatattttttcctaaactttatggctttatttttagcatatacatctttgatgtgaatggaatttattgtgacttaacaactgaagtatacatattaacttccatttccaatggaatatcattgattgagattataattaacttatagctcaataaaaaaagagttttaacccagagttttcctaaccaagaacagagtatacctttacagttacttattttttcatttttttttccttcgggagtgatttaaaggttctttatatagttattacatatgtattttataaacttttggaatgtgatgtttcttattataagtaacctttctactaattatttgcatataataaagctcaattttttttgtgtattgatttcataatcaccttactgaattctcatattatttttattagtatagtttttagaggattcttaggagttttccaaggcgatgtggtttggatctctgtccccacccaaatctcatgtttaattgtaatttccaactgttcattgcttgtaatccccagtgctggaggtgggcctggtgggaggtgatattggatcatgggggctgatttcctccttgatgctgcttgatcatgagtgagtgctcatgagatctggttgtttaaaagtgtataatgcctcccctctctctctcttcctcctgcttcagccgtatgagcataactgcttcagctttgccttttgccatgagtaaaagctctctgaggtctctccagctatgcttcctttaaaacctgcagaactgtaagctaattcaacctcttttcttcataaattacccagtctctggcatttctttatagcaatgggagaagagactaatacacaaggttgtaataattatctatgaataatataaagcagcctgtttttgaaattagacttctgttatggagtgaatattatggtggaatatgacctttctaaaatttttctgttcttaaaaacatcatcttgggctgggtggtggctcatgcctgtaatcccggcactttgggaggcctaggcgggtggatcacaaggtcaagagaccgagaccatcctggctaacacggtgaaaccctgtctctattaaaatacaaaaaaattagctgggcatggtggtgggcacctgtagtcccagctactctggaggctgaggcaggagaacggcgtgaagcttgcagtgagccgagattgcgccactgcaccccagcctgggtgacagagtgagactccgtctcaaaaaaaaaacaaaaccatatcatctttaatgaagtaaatgtcatacaacaaaattgaccaattttacatttgtaattctgttttaatcatgtagtacagctgtataattaccacaatcatcatataaaacatatcaatcctgccagaaaattctctcctactcctttcctgtcaattgcttctccctatctcttgttcctggtaccactaaataacttttggtcattgtagttttaccctatctagaattttatataaatagactcatacggtgtgcagtcttttgtgtctcacttttttcacataatatatcatgatatggctatacaataatttgtttatattcactagttgatgaacatttgggttgtttacaactttttggctattaatgaataaagaggctattcatgtacattcaagtacatgtcttgtctgggtgtgtgttattatttctcttgggtaaatacttaggagtgagcctgctgagttgtatggtaagagtatatttaacttgggccgggtgtggtggctcacgcctgtaattccagcactttgggaggccgaggcgggtggatcacgaggtcaagagatcgataccatcctggccaacatggtaaaaccccatctctactaaaaacacaaaaattagctgggcatggtggcgtgcgcctgtagtcccagctactcaggaggctgaggcaggagaatagcttgaacctgggaggcggaggttgctgtgagctccattgtgccactgcactccagcctggtgacagagcaagactccatctcaaaaaaaaaaaaaaaaaaaagtatatttaacttaataagaaactgacaaacactttgtatgactctaccattttgtattgccatcagcattatatgagtattccagttgcttcacattttcaccagcattttgtattgctatctgctgaatgtgtccccaaaagtcacgtgttggaaactgaatgcccagtgcaatagtattgggaggtatggtctttgagaggtgactgagtcatgaggactcttctttcaagaatggattaggtctcttataaacagggcttacagaagtgggttcattctccttcattcttctaccatgtgaggacacagtgttccttctctctggaggatacaacattcaaggtaccaccttgaaagcaaagaccagactcttactagacaaggaacctgccagcaccttagtcttgaacttcccagttcccagaactgtgagaaaataaatttctgttattcatacatcaccgtttcaggtatttttattatagcaacacaaaaccaagatgggtattgtcttttaaaaaaaattctagtgagtgttttgtagtatctcagtgtgtttttaattttcattaccttaatgaccgatgttgctgagcatctttgcatgtacttacttatcatttatagatattatttgatgaagtgtttgcttgaatttttttgtctaatttttattggtttgtcttactgagttgtaaaaattctttatatattcttgaagcagatcctttatcagctatatgttttgcaaatgttttctcccagtctctgtgacttgcctttttattttttaaatgatactttttgaaaagcaagcttttaaatattttgaaatccagttcgtaaatttgttgcttttatagtttatgctttttaaagaaattgagtgtaacccaaggtaacaaaaatttctcctgtgttttattccagaaattttagttttaacccttacagttaggtctgtgttcctttctgagttaaattttggatatagtgtgaagatgaggattaaagttctctctcttcttttggtatataaatatccaatttcccagcactatttgttgaaaatggtatcctttccagagtgaaatacactggcacctttgttgggaatcaatgagccatataagtgtaggtctatttctagattcactattctgttccattgattcacacgtcaataccagatgtcttgattacttgagcattataataagtctaggtgtaagttttatagtaagcctgagtgtaagacttctgactttatttttctttttcaaaagactttcaactttactttttcttttattttggctatgctagttggttttcatttctatgtaagttttagaattttcttgtaatttctgtggaaaacactgctgggattttggaattctgttgaatctatagatcagtttggggagaattgatattttaataattttgaatcttttgatttatgaccacaatatatattttcattatccagatgtctttaatttctttcagtaatgtttagtaattttctgtctacatgttttacaaatattttgttaaatttattcctctgtttttcatatttttactatatttttatgatatttgtttaaaatttccaactgttcactgcttatatatgaaaatgctactgatatgttgactttgaatcttgtgaccttgcagttagttctagtagatgttttgaagatttcttagaattttctacatagacaataatgtctgtgaataaagatagttttatttatttatttatttatttatttttaaaattttttggaggccttgtggatttgaagagttttttttctttccagtcttatacctttttagtttttttaaaatttttcctgccttatattgtattgataagaacgttcatacaatgttgaataggagtgatgagagagaccatccttgccttgttcctgaccttagagtaaaagcattcagtgttttgcccttaagcaggatactgtttttagttttctcatacttttttttttgaaatggagtctcgctctgtcacccaggctggagtgtagtggcatgatctccactcactgcaacatctgcctccccagttcaagcgattcccctgcctcagcctcccgagtagctgggaccacaggcgcccgccactatgccaggctaatttttgtattttttattagagacggggttttgccgtcttggccaggctggtctcgaacacctgaccttgtgatctgcccatctcggcctcccaaagtgctgggattacaggcatgagccactgcacccggcccctatagatgccttttattggattgaagagcttttattttattcctagtttgctgcaaatttttttttttattattacaaatgggtgttgaattttgtgaaaacttttttctgcatccattgagatgatcatatggtaagttccattttagacaattgatatgatgactcattgtttttctaaggttaaactaacttcacattactaggataaaccacactggattatgatgtattattcttttaatatatttcaactgactgaagtattgttaacatttttatatctatgtttataagggatattagtctttagttttctttcttataatttcattacctttggataagttaaaaacatttcagtcgtattttagtttttccactcattacatttaagactttaaataaacatacactttaaactctatttctatatatatcaactttaaataatatattctggagttttaattttaggtaggatggagtaagcacactcctccatctctgagtgcacactcctccatctcttagtacacactgaatacagctaactcattaaatatagctttaaaacctgggtataatgcgtataacagtgatataaggacactggaaagtaaacagtagcaagaagattgggaagaagaccagaatttaaagttttatgaaatgccagttagtttatctttttttttttttttgtaccactatcccttggcatggattcaaggtagtctgaaactcaaaacctgtacatagacatggcatggataaggaacaaattacagacagagctccagaagaggccctatagttttgacttaagcagtatgaagcagggctgggggtgggaggcatcacttaatctccagagacagtgagggcaatccatcatttttattttctttttctctatgtttccttgtaccatagtccccaggcaatgctgtggcaatgacagcagtggcctactggacctgcaaggggctaaaagtctgagctgggggggtcccttcctcttcatttggagaagactgatctcaacagagtgatatgaacactcattgattttttttccctctttttatcctcccaccaagtggcctcatatgtaggacaattgttggaagagcatggtagagcaggataattgaagccccagctctttgtccagaggactgaaagggtagccccaggaaactgaagagtatcagcaagatgtggtgagaaaggacctcagggaaatgactccctgaaagtagcttatgaactctcaggcttgctccttagatacccacttacagatctgattctaaacaacatatcaacgactttgaggtctgagctaaggaatagatcatcacttaatttccatattggccaccgggtgacataaacaggagacagatcagaatagcactacaaatgctttgagggaagaaaacaaacccaaaccgatattgaaactacaacccaggaaaagtcagttggaatttgtggcctgaatctaactgggtcagctgctgaaacaaaacaaaaatatcagcattctccatgggatttaaataagacccagagtcttatattattcaaatgtctgtgatatgatctaaagtaacttggcatcttaagaataagaagaatctcaactcttatgggaaaagatagtcaacagaagccaacgcggagatgacacacaggttaaaattttctgacaaggtctttaaaagaagaaagggtgaatacatttgaaatgagttgaatgaaagataattttagcaaataaatagaagacttaaagaacatccaaatagaaattttaaactgaaaaacataacaatcaaaataaaaacctctccagatggtttcaatagcagaatggagatggcagtggaaagggtgaattctaagaaaaatagaaattatacaactgagagaaaaaagatgaaaaagaaaacaaacagagacttagggatctatggaactctaccacaatgtctaatacttctgtcatcagagtcacagagggaggagaaatattgttgtatagaaaaaatatttgaagaaaaatgtttataagtcctcaaattgggcagaatttctatgtagctcctatagattcatggaacgcagggaaacccagacaagataatcctaaagaaacatgtttaggcatatcaaaagcaaactgttaaaaattaaagacaaagaaaaaaaagcttgcaggcagctagagaagcacaactcattacttataactgaactatgattctaatgactacacatctctcatagaaaccatgactgtcagaagaaagtgaagcaatatttttaatgtgctgagagaaaaaagtgtcaacctagaactctatatacactgaaaatatccttcagaaatgaaggtaaaatagagaccacagatgaaaaaaaactagaaaataattcattgccagtagacctgctctgaaagaattgctaaagtaggtttttcagacagaagaaaaaatgataccagaaggaaacttggaacattaggaataaataatatcttttaactctgatatgaatggttaggaaattggcacatacatcctcctttctgatatctttttttttttctgccagtgtccattttttcttagctatactcttatttatacatttcaatgtctataaatttgcacaattgtcaagccttacttctatgttttaatcaattcagtgcaaacaatacttttatgccatgaattcttcctttctcaagttcttttgatgacagcacttgtttggtgagaatttgttatcaagaggttttatatcccttaagaaggtctgtctataatcttttgactcacaattttggatactaaatgttggtatgaagaaatctgaggtcactctgattttcctcccatgcaaatgaattgctttttctgagtgaatgctcattcagcttttatttttattcttaaaggtaaacagcatcaccagaatatatcaagttgattactggaatgaattactttttcctggaacatgatgaatccttttcatcctcagacccagatgttcctttatttcagaaacattttcttctatttaatttttaaatattattttctgattgatttgcttgactcccagggttagtcaagtttatgccaactttatttggtctctcttacatatctatcttttaaattacttttgcttctttgttttttgcatttaagttttcagattttttttttcttcttttctgagacggagtctcgctctgtcgctcaggctggagtgcagtggcgcgatctcagctcactgcaagctccgcctcccgggttcacgccattctcctgcctcagcctcccgagcagctgggactacaggcgcccgccaccacgcctggctaattttgtttttgtattgttagtagagacggggtttcaccgtgttagccaggatggtctggatctcctgacctcatgatctgcccgcctcgacctcccaaagtgctgggattacaggcgtgagccatcgcgcctggcagttttcagatttttatcagcctttcttctatgctcccgattcttttataaattgtattacattgtttttgtgtctctatattgcgtttatgtctatggtatttgtattattaacttttgtttcttttgtgaactctggtagcttggtttcactatctttatttcctctttaatttcatatcccttctcagaaagtctccttttcagatcgtttttttccctctttagtttcttgagcgtgtagactattatttgtttactttttttttcatttcctgtggtaattcttctgatacatattctttttaagtgtttttcttctatatttataacaattgtacaggtggtaaattatacatgccatagtactatagccaggtctgctccttggaaagtctttatgtaatatggaaagaaaatctggaggtgggagaattagaaatctgacatcagtagcaggaagattggatctagatgatggggagacacagggtggttacttcattgtgtaaggcagagattggggctgggatgtgacactctgagttggtaggaaaaagagcctgagtgtaaagagaagaacaaggctgatctgagtagcaagaccctctaccctaccttactggaataagctcatccatgcacagaaagctgtaggaaactgtgcacactgctatcaagtatagttttgaatggccaaattatttatttgatgttagttaagcaaacagtttttaccaccgtgaaaactttttctgcctctatcatttctgctggtctccatatagtcccattaaaaaaaaaatcaagcaataaaaaatatacatactaaaagtgaaagctgatcttaaacttcctcccagtccttcacctccttcctaagaagtaactactatttaacaattagctgtgctgtgtctacatcttgaccttttcctgcgtatgcttatacataagaattttctgtctttactaatatatcttttcaatctttctatgccagtaaatatttttctactacaaaaatcatttgtatagtattatatactattattgtatactatatattgtactatatattgtatactatatattgtgtagtattatatacctattatttatttaactatctgctgttcttggtcacacatttaccctaaaatgcagcagtgaacagtcctctatgtggatattatgagagtttctgtagcatataatcctagaagtggattttgtgggtataagaatatggacagataaaattttgataagtactgagaaataatacttcaaaaagcctgttccaatttactgtctcattaatgagtctattttcccacatctttatcaaaagaatattattctgatttttttatttttgcccattagataagttaagaattgtgactcattacttataaaatttgcatactaccaactgcagtggaatttcagcatattttaaaaatactctttgacccatttcttttgtaaatttctgtctatttttagtagcttttttcagttctttttggtttctagaggtcctttatattggttattaattgcttctctgttgaagatgttggaaatattttctcagtctctcatttttgaatttatttataatctttctattattcaaactatttgaacctttatatagccaaatattttaactttatggcttttatatctttgcttataagaatgttctctaaggttaagatgaagtttgcctatatatttttttctgatatgtatgtagttattaatgcttttaatgttttattgagcttagtttttaatctgtctgtaaataattagcctcttattttgacactgcttattgaattgttggttctttttcctctaatttgaaatatcacctgctttatctttccatattgatttatgtatctactctgggaccagtgccacactgttgttggtatttagaatggtcaggcaagttcttcctcattattcctctcttcaaaattgtgctggctatttcgtttcaagccatctgtttagagttttgattggaaatggtatcaaatttatacataaattcgaagagaactgatgaaacgggaaagttcccttattctcctcacagggcgtgtgacaggggcatgactggtttcttcagtgccccactgcccaaagccctagagggaacatgcagacagtcaggtcggggggcgtctagggttgagtgtttacagctctcaaagccccagtgggcatgtgttacagtgcactctttcagttttgccatccacaggtggcttgtattaatcagctcaattacagcctctgccttattgcaaggacagagggctttctgtatcccggggttcttgccctagagtactggaaaaatcggatcacatgtgggcttggaggatgggtgcaaggttttattgagtggaggtagctctcagtgaggtggatggggagggcaaaagggggatggagtgggaaggttgtcttcccctggaattggggtgcccaatggctggacttccctccgactgaatttcccatattgtctgcgtcattctgctgttgatggcctgctggcatctgctggtgtgttcttctgccagtgtgttcctctcaacatccagacacttgtgtgtgcgcccgctagggtctcagagattttatgggcacaggatggaggatgtgatgggccagagtggtcttggaaaatgcaacatttgggtgcagaaacaggagtgcctgtccttacttaggtccctgggcacaggcctgagagtgaagccctcaccagggaccctgcccttctctatccagcatttccctatctccctcctgtatcactgatatcttttactattgagtcttcacatccagaaacataatttggccttctgttaatttagagcttcttttattttcttctgtaaaaatttacagcattctttatattatatgtttcttattgaatttaattatgaacaggttatactttgttattatcatgggatcttttaaatacattctaattggttatgacaggtttaaaaagctactcttaatttttctgtgttgatcttgtatcccaactaaatcctgtgtttgttctaaatgcttactagtagtgcctcttaggtgttctaggtggctactcatagcgtctgataacaataatagtttgtctttttctttcctatatttacaccaatttttttctcctaacatttaaaggttttttttttttttcagtttcctgtaatgattatttattgaatttggaagatctccattgtggtgttaatttcttaaaagcttagtgtttcttgcttgctcttatttgttgctgaggacttagattaaacagtttattgcttttgaagtatattttgtcagtccagttgagggactgagtctcagtccagatgagggactgccagtttgtctagcagttgatacaaactaattacctctggtaactttgcaggagctgaaaacagaagtgtgactagtaaggtgtgaaggtggcttgatttctagatatgaggctcttggtgcttgttggctgacagacactctccctttctttagttcagcagccactctggtagtcttaaacgtcagagtttttaagaggggtattcatagcccaaatctagggataaatgtaggagatggaggaaaggggagttgccgttttattggtgccactgtttagttaaaatacctaaaacattttctcattcccctttttcctgcctccactgcctttggatgtagatttattctggagttctgttgggaaaacacactattttggaatgttttacttgtctactgagagggttcttcggctattttggactatgttgtcaatctatttgctattgctgtgtcacttctagaaactcctcattgtcctggactactggcaaagcttgttttcaatgctgttatgaatttgctaatttatttcctttgtatctattgtatttatgcacagactttatgttagatccttttggttgattgttatccttaattagggataatgccatctggacctgttaatttgctcaagaactgagtggagaggggtggatggaggatgacacattactcactatttaacaaaataaaggtttttttccataataaagcttgttatataacaggtaaaaaatacagaaaaacaagaggaagaaaatgatcattcataattcagtcatgacaatcactgctaatatttagatatgttagcagtgatatcatattatatatatatattagatatattaaaggactatcagtcctctcctgatgcatatttaacattcttgtgattatattctgtgcagcattttgtatttattttttccagttaacattttaacacatttcctgtatcattaggaacactcatgattaaatccttactttaataatatcataagatagagtaaaatggatcctccaagggtgatacttacttgtctttggccatttgggttaatttggtatttagttcttttaagaaggaaattcgatttttatacatttattattaaattttttgaaataaaatctacagtgaaatgtatagagcctaagtgtctaatttgatgttttgataatgcttacatttaagtaatcatgaccccaatcggatacagcatatttacctgactcactttttaatttaatttaatttaatttttgagacagggcctcactctgtcgcccaggctgaagtgtactggcacaatcatagctcactgcagttttaacctcctgggcttgagggatcctcctgcttcagcctcctgagtagctgggactacaggggtacaccatgtctggctaatttttttttcattttttgtggagacagggtctcactatattgcccaggctggcctcaagtgatcctcctgcctcagcctcccaaagccctgggattacagtcatgagccaccatacctggccaactcattttaataatgtctaatgatgaacacctataagaaggtttttcatatttatgtacttggactgtgattctaaaagtgaaataacttggctttattttacaaaccttttagtggactttactaaaatcgcttccagaagtttgtatcaatttacattcccaccagtaagtggagagtgtcaatctttttttctgtgatccccctaacattttttgactatcccccagcagataagctgcacagtttcttgttgaaagcaagttatgactctttctgttaatatctacttccactcaatcatggttgtgtgtgtgtgtgtgtgtgtacgtgtaaaccatcactgttcatgcattcagtggtgttgtaacatttctcccacaagcaaccttcattggcattatttatttatgacagtgtcttcctcatgaaatcatgtctcagtagctcttctctgtcttctttcaaagactgtggtatttctagtcacacaggctctaaaattcatgagtcccaattaatgtctcttttgctccaatttattccaactcttgttcattctgttttcctggctcacagctcttcctactctgtctttccattttcattctcattgccttattttagccctttatgacctcttacttaaaaaatttctatagcttatacctacactttctccctacgcaaatctgtctgacccatgattgctagattaatcactccagagaatttgtgcttaaatattgttactcaaaatactttagtctccactcaaaatccttctcctggggatgtcagcaacatggcagaacaggagactcctgactattccatctctcacagacatacaagtaaacacctacacatgaattagttctctccaagaggaagctagaatccagttgaaagtctcccacacactggaagactgagaaaatacccacatccaaacaggtaggaaaagcagagacacacttgcactaatcctaccatgagcacaacgccttataattaggaaggaaactccaactcccagcttcttccagaaggttgggagtcttgtaccacatgtatagtgcccaacttttacagttcctgtgggagggctttgatcttaagttaccatgcttgaagaacagtagggacagtgcattggaggatttctctcaagcacaatggacaaaggggcttttgaaccatgtgaggactcccagctactctagcccccagggatcagcccaacttctaacttccccctaaagagggttcagcctaagacttttcaaggaactccctgtggctctggcttctaacaagctggtatctgggagtctaataaggagcctataaggattaaacttctttgagtctaaatcagaaagaaggcactccctgtgccttctccccttgctgtctcctgatataaattcctgcaatctctcattagaaagagaagggtgtacctctccatgtctgaaaggaaaagggggcactctctattcctctaccctggcttgctttcacgataagatcacacaaggctccccctacaaggagggtgtgaaacttctgcttgcttgaataggagagtgggcatcacttgcactttcttccttggcttgttccagtgacgatttcagccctacaatatctccatggaaagaagtttgatgcctccaccagcaagaatgaaagggatggcactcctcatgctctttttctcagtttgctcaggagataaactcctgaaatatctcattggaaggagatagagggacctctccatgactgaaaaggaaagtgagaagtccctgacccttctgctctggcttgtttcagcaataactccagaccagaagcctgtccctactagaagagtgagagacttttgcttgcatgaacaggaaagtgggcgttctctgaaatatcttctctggcttgctccatcagtaaatacagatctgcaggtcctggaagtagtttctgcaagcaccaaggactccatcttttacagtttccaacaaggtactggcttctaaattacctagatcttggagttaatggagctctacattcctgagtttcctaagttacagagaacataaagatgacttttaaacatgcaaattttcagcaaatatttccacaggtccaaagtgagaagtctgatcaagaatacaagtatctctctcagtcactcaccttgtgtacagcagaacaagtgtgagataaactctggctgtcaacttctctgcaaagaaagaaggaactggaacatatcttacacctcaacctcttcagctgcattctaaggaactgacttctatcccacttctctcaaggcaatagcatgacttgacactctctaatttctttggggacactaagaacaaagacatcaggttagatgagtacaaggagtttggaagcaccaggaatctctggctgggctgatgggggagaaacatcttttacatgggaccagtctaacaaaattgagagagatggttcttttatctaatgcatggaaacaaacatgagagccaaggaaaaatgaagaaacgtggaaatgtgttctaaatataagatacatctctggaagccaaccccaatgaagtggagatatgtgatttacatgacagggaattcaaaaggacagtcataaagatacttactgagacaaggagagcaatgcaagaacaaactgagaactttaaaaaaagatagaaaatataaaaatagcagcaaacaaaaataattgagctgaagaatacaataatggggctcaaaaatttaatagagggtttcaataccaatctatataaagcagaagaaagaattagcaaacttgatgacaagtcattagaagtcatccaatctaagaagtcaaaagaaaaaagaatgaaaaagggtgaagacagtgtaggggatttgtgggacaccattaagtggaataatatatacattatcagtgtaccagaaggagaaaagaaacagaaagggacagaaaacattcaaggaaataatggcagaaaatttcctaagtctggaaaagaaaatagaaatccatatccatgaagctcaatggtctgttataggataaattcaaagggacacacaccaagacacattacaatcaaattgtcaaaagttaaagacaaagagaatattgaaagcagtaagggaggagtgacttgttacatacatgggacctctagaagactgtcaatggattttccacagaaatcctgaagggtagaagggaaagggatgatatattcaaaactgaaataaaaaaaagaaccctgccaaccaagaatactatacccagcaatcctgtcccttaaaggtgaagaagagataaaaactttctgagacaaacaaaaggtgagggaatttatcaccattagacctaccttacaagaatgctaacaatagtccctcaagcttaaggaaaaattgttaagtagcaacatcaaagtatattaaaacataaaacttactggtaaaagtaagtatgtagttaaactcagaacactcttagattggaacagtggtgtgaaaataaattttgtttctagcatgaaaattaaaagacaaaactataaaaacaactgtagttacactaacttgttaagggacacaaactaaaaattacaaaacatgtcaaaaaaacaaatggagaggaataaaagtatagagtttgtgcaagtgatcaaagttaaatcattatcagcttaacaagggatgttcttagcatatgatgttttatataatcctcatagtggccaaaaaaaaaaaaaaaacaactccttagtggatacaccaaagataaaaagaaaggattcaaagcatactgtgataggaaatcatcaagccacaaaagacaaccataagagaggaagagaggaacaagtaatctacaaattaaccagaaaacaattaacaaaatggcaatagtaagtctttatctatcaataattactttaaatgtaaatgaactaagttattcaatcaaaatacatcaagtggctaaatggattaaccaaaaaaaagactcagtgatatgctgccaacaagagactcatttcatctctaagaacatacatagaccaaaaatgaagggatggaaaaagttattccatggaaatagaaatcaaaatagagcagggatagctatacttatatcacacaaaatagaccttaagtcaaaaactataaaaagaggtgaagaaggtcattatatgacgataaagtggtcaattcatcaagaagatatgacagttgtagatatgcatccatccaaagttggaacacctaaattggtaaagcagatattaatagatccaaggaatgagatagactgtaatataataatagtaggataactaaatactacacttttaacattggacagatcatctagacagaaaatattggacttgaagtatgctttatttatttatttattttgagacagggtctcactcttttgcccaagctggaatgtagtggcaagaccatggcttactgcaacctctacctcccctggctcaagtgatacccccacctcagcttcttgagtggctggaactacaggcatgcaccaccattcccagctaatttttgtatttttttgtggagacagggttttgccatgttttccagtctggcctcaaactcttgggcttcagcaattcacctggcttggccttccaaagtgctgggattacaaatgtgaggcactgcacctgccctgaactacgcttcagatcaaataaacctaacagacatttatagaacattccattcaacagcaagagaatataaattcttctcaagtgcatctggaacattctccaggatatatcatatgataggctgaaaacaagtcttaacacatttaaaatgattgaaataatattgagtattttttctgaccacaatggcataaaactagaaatccataacaagaggaaccttgaaaaattcccaaatatatgagaattaaacagcctgtttctgaataactgatgggtcaaaggggaaattaaaagagaaattaaaaaatatcttaagacaaatgaaaatggtaacacaacatatcaaaatttatggaatgcagcaaaagcagtcctgtgagggaattttatgacaatacatgcctacatcaaaaaaggaaaaagatttcaaataaacattggtagaaacgggatatccacatgcagaagaaggaaattggatcattttcttacaccatatacaaaataaactcaaaatgagtaaaagatttaaatgttaaggcctgaaactgtgaagttgcttggagaaaatgggaaaagctccatgttgttgatctgggcaatgatttcttggacagaactccaaaaaccacaggcaacaaaagcaaaaatagacaattgggattgcattaaattaaaaagcacagcaaaggaaacaattaacagagtaaagacacacccatgaattggcagaaaatatttgcaaaaacttagacatctgatgagggcctgatatccaaaatatatgaggaactcaaaccactcaatagtaaaaaatcaaactgattaaaaactgagcaaaagatctgaatagacattcctcaaaagagatataaatggccaacagatatatgaaaaaaagttcataatatctaattatcagggaaatgcaaattaaaaccacaatgagatatgacctcacagctgttagaatggctattattaaaaaataggaatgataaagttttgatgaggaggtggagaaaagggaactgtttattggtatgtaaattagtatagctattttggaaaagagtatgggagttcctcaaaaaacgaaaaataggattgccatatgatccagcaatctcacttctaagtatacatccccagaactgaaactgatatgtcaaagaaatatttgcactcccctgttcattgcagcataattcactatagtcaaggcatgcaaaactcacaaaagccaaggtatagaacaaatgaatggtttaaaaatgtggtaaatatacacaatagaatactatttagccttaaataagaaggaaattttgccatttgcagcaacatggatacagccagaggacagtgaatgaaattatccaggcacagaaagacaaatgctgcctgatttctttcatatgtggaagctaaaaaagtcgaccttacagaactagagagtagaaaggtggttaccagaacctggagggatggggaaaggaaagatgtcgatcaaagtgtccacggtttcagttagactggagaaataaattttagtgttctattgcactttatggtgaccacactaaaaaaaaatgtactgtatatttcaagtttgttaaaataatagatctttaacattctcaccacaaaaaattagtgagttgatgaatatgttacttagcttggttgaaacttgaatgtatacatcaaaacaaaagagcatattctataaatatagatgatgattatttgtcagtttttaaaaattgaatcttggcatttagggccctccatagtcttccatttttattcctctttatctctttgatcatatctatattctagccagagagaacacttgttttaatcatatttgacacaattctctattgttctctgctttagtcaagtttttgccttttctggagtactttttgctcctccatgatttaatttttcaaattttaccttttctcaaaattcagtatagatgtcatttctttcacaaaattttccctgttaagcccagaaaaataatctcttttccctctgaatcattagggtactttattcatttttgttttgagtgttattttcttaccaagaaaatattatttctttcagtattatgttgaattatgattcattcactgtctaaacctccttattgagtggaaatttctatgagggcaagttacaggtttaaaattatttatttatttttttcaatatcttgcacacagcagaaaattggcaaataaatgtttattgtctgagtcgtactggggagaggaatggaatttggagcaaaggacataacttatttgaatatattggaaaacataccaatctagcatttgttctttaaaaaaatgagttcacaagtgagatatggagcaagatttttagaggttcaaggactgacacatttctgtgggatattctggtttgacttccaaatcacctctgggtcaagacactggaggtgttttagagcttaaaatagaaactcggagctcagtgaaaaaatatatgatcgattattgctgcaaatgtatagaaaatggaattagcacatgcccgtagtatttcaaccatgcttaaagacagtctttctgttgccttaaccccttttgaccacagatggccgtattaagaaaatatttattaaaaatcacagaggtctattcttcatctgctaaactggtagattttaaggatatggtcccttctccatggtgctttaatatttgctaaatgtgtatgtgcacacatgtgtgtgtgcacttcacatcttatccgggcatattggaaaccttgtaatatagtttttgtttatttttaaccttcctctctactgccttccactaccaccatttaaatacacaaaactgtcactgtgtgagatatggccattatgttgctagctcttctgtgatgtttataaaatatgtcaactccctatagtgaattggcattgttttgctctcccacttcctatcaacgaaaaaaagcaaatgcccccaagtaaataatctaactcattaaccctcactgcattacagagatggaaaaatttatcaataataagagctgagcatcaggggaagatgctttatcttaccccaaacctggagactcatcccggggggcaccaggtctctgcagtagctcccatctccttgcccatactcttactctccacctgcaccattcatctgaataaattagcctcactgagaggaagatgacagcaaagagcgcacctgcaatgtagtgtgactgccgcagcttagtaaggggtttccagggaagcggtttctaaaacacaggggaggagaattgtcagggtttggctccttgtgaaatttgcctgtcagaacagatgatgcgtttgggcataacacactccagtttgttcttctggcagtttctcttctcaatttcaaggctttcacagttttgctgcaacttatccttttaaggggctcttcttctcccatttctccattgactgttggtccagagaggtgagagattatgttgaaattgtctgcttaggactgatttgctgtagaatcaggccaatcacaacaacgggcccctccagcatctgccctcactgcccttgttttcagggcaccatccccccatcctccggtttgtctggaattggagggggtctgggggactgatgttccacaagccatgatcagactagttcagagggcagtgggctttttctggaaatgacatggggaaggatgtgaattttggaggtgcagggagagcaaggaaacgtaatacagatgtgatcatggtgtactgtttgtgggagctgtcttgtctcttaaaatcttgggggatgtttcagtttggaataataggtgagtagttaaggctagaatatgaagtattcatccagaagtgttcattggcaaatgttatactaacttgtgtcacacaggtatggtgtttctgcccattgaacctcaccacaatgttaaggaagtaaatcttattatcctcattctattaatattgcagttgaagcacagagaagtcacatgggtggtaagagttggcactggggccgggcgcagtgtctctctcctgtgataccagcactttgggaggcagaggcaggcggatcatgaggtcaagacatcaagaccatcctggccaacatgttgaaaccccgtctctactaaaagtacaaaaattacctgggcatggtggcatgtgcctgtagtcccagctacttgggaggctgaggcaggagaatcacttcaacctgggaggcgggggttgcagtgagccaagattgcaccactgcactctagcctagcctggagacagagagagactcaatctcaaaagaaaaaaaaaaagagttggcattgtaatgaaatctggagctctgagcctggtctatagatttttctagtatctaatctcccaagagggtaaaattccatttctaaagtatctggccttgctttctttaaataatggataataaggatgtggggggtggacctctgcgaaggaagaatttaaatatccagagggagagaatgcctctttagatttgtggtctccgtgataagtagagctgctcttttaattttatttcaaagttaaatgatagtagtgagtggaataaaggcaccaatctaagaactgttttccaattctctgctttcagctctaaaacaaagagaatttatcatttgccttcatatactgtgctgtgtaggtacccagagacagcaaaattccaattaaaagagtattgattgctcataaattaatgccatccattcagaatcgatggtcacttaatgtctttcaatgatttttattgtgagtcagctcagcccttgtactttgcttattaaatgttccagtataatcgtacgcctatttaacatgggtgattcttttgctattaacatatggttttcgattttcatccagttagcactattagtcattccacatgaaagtcagtgcaatctaacaaactcgaacaacttccctcacctactctcagagataatttatgtatccctcattcctctgagcccaaagcaggtaaacatttccaattaaactgaagagagtaatagaagctctccagaatagtaaaaaaaaaaaaaaaaaaaaatccacaaaaaaaccccaaacaaacaaacaaccttccaccctaccccccgcaaaaaaaaaaacaaaaaaacccaagaacaaaaaacaaacaaaccctcctaggaaactaaagcataaaaatgtcatgggaagttataactggatccgtaggggatataatttcattgcctgtaagcaaaatcgtgatctaatggttttcggagacatggggtactggacatctgtgaggggcctgtggaatcccccagagcattgtgctaattaagtaggaaagggaagcacgttgggaagccaccagatgtcaggctgaagtctggcagtaaagggagctggctaagctcaaggaacatacatttcaggagacagatgtgatcactgtatgaggcttgggtgaaatttatcttccagttcaatggctggaccaggacgtgaggtaacctgtggccaatcaggatatccttgtgactaatgttaatccttcagactcctcagatttcatcccacttctttgcattggtgtcacagctagagtccatgaaggataagcaaccgagcagcttctgcctacttttgcacttctattctgaagagagctgttcatttatttagccagtatctacttttggcattaggagcttttgagtgaggttgagggagtggaaaagagggcagaaatccaggagaggagcgcatcaaatgggaacattcctcagggaccaggctcctcgcgttctgatcctaggtctctcacacattggttgcaggtcatttaatttctctctgtttgtttgcttatctataaagaaattgtaccaaataacacatcccttccagagctaaaatttgttctactacagggtctagaatagcatcctccaactgttttgctcatgtacttgctaaaagaattttttaaaagggtgtgtacccccacattttaaagatgacatgccataaatttaattagttacaaaagatgtagtttccagcatattgtctattgcataagggttttaaatacatgtttttcaaaactgtgaatttagctcattccgcttatgatacatgtcaccacatcacctaattaacaaagccagttcttattgtcagatcattcagccaaataagacttgttttctgtcagaaaaagtctgactttattttgtaatttaaataaatacatcaacatgcaccctgctgacaatcatctcattttggaactccaattctaggatgaataactaattagatacttcgaaaactagtaagccagctagctaaagcagggatccttgccatgagttggccagccctttaatgtttcttaatgtgtccttaaagtactggtccttaagagcaatgtagtctccaattgtccctttgtttagtggctctgaggtttgtaaacaatgggacaagtcactgtgtcagtttcagattgaatgagagatatgcttttcttttggaaagtgggagaagggtcattatgagatgggaggtgggaaaaggagaactagcagcctgtagatacgttattaggcaaatttattttagaaacaatgcctatggaagttgagaatctggaaaagaatctgcttaaaatcaccatgatatgtatcccctggggagttttcatgtacccctgccaaggagtacacagcccggaagcacaaagaattggtagggggtaggatactctccactgtcatttcatgccaagcatttcaataaggccggaatggcaaggactgtcttttgttagggctggcagcccccacacatgatgcatactcccctttgaaatgaattggccatcaagcaactttctatgattgaattcccaggtctgtcgttagggtattgccactttatcacctaatatttactgagaatctaacttgtaggtgcttctgggaacataaaatataatttatgcaatttatgaagattcaaattttccagaagtcaggatgcctagaggcaaatacagtagtgattaaaagcaatgactctggaataatttgtcctaggttggaattcggtctctgcaattttgcttgtgttacggggatagcctctgttttctcatctgtttaaatagaagaaataatacctcttttacagtgtttaatgttttctccatttctcctcactccttcgtccatgtttcaccttctctgcaatgattcatccttgtagaccacatcactagagttcccttgccagttaattggcttccaatatttgctaaaaagtggtaccaggggagattggagggtgaggagagaggtgagatatcttttctaggccctctttgggccatacatgacaccatggctggatcccttcaaaactacagacaacttttgctgatggtcttgccttcatatttcaaatctaactctacctcacaggcttctcataatttctagtctctgaccataccatcagaatatatttactgtgatgtttcaaagtttttcttcaaaggaacttccctctcctttactcagtgggttctggatgtgagacgaggcttatatttggaaactgggcaggggatacccagttcatactggggtggctgctttacctttctgatcaccctgattataacagttaagcactagtctcatttgctgcccacttattttgcctctaggaactctgtcttctaccgaccacgtccttattctatcctctgccctctgttatgttggctctggcatttctacttcacttagtgtgtgacctgttgctttgcctaagcttccaagggccatcctagcagtgtatgagcattgtttcccagggtctttgccagagtgtcaaatctgtattctgagagagagcttctgtgctaataaactctccctcatccaactttacaattccctcctctcccctttgtctagcactctctcaggattcatttttggggtcataatctccaagtaccagctagtctccatcaaccagagtctgtagcacctttggtgctttcacttttccctcgaattggtccttaatcactcttagccagtcattatctcttttaatgaatcaatggcactcaacagccacccaattccatccttatatttgcctttcccctcaaatatctcaaaagccagacatactgtaccagttagtgctcctccttccactggcatcacatcccagtgtacaaccagtgaaaggcttaataattgcaccactgaagcatgcctggtgctatctatactctacctgccactagtggtggggcctctttgtcagccagctggcaggtgatgcagctccaaaatccaaatttagagtcttcttcctgggatagctcccggtatcaactcacttagattgggttctttggaaagagattctgagatgaggagctacaggtagaagtagaaagtttattggaggccaggcacggtggctcacgcctgtaatcccagcactttgggaggccgaggcgggtggatcacaaggtcaggagatggagaccatcctggctaacatggtaaaaccccgtctctactaaaaatacaaaaaattagccggatgtggtggcgggcgcctgtagtcctagctactcgggaggctgaggcaggagaatggtgtgaacccgggaggctgagcttgcagtgagccgagattgtgccactgcactcactccagtctgggtgacagaccgagactccgtctcaaaaaaaaaaaaaaaagaaagtttattggaaaagtgttcttgggagatacactggtaagaaagtcagggtggcaagattgggaagaccaagaagctgacctccatccaattcaattgcaagtgcggcttcagctgatcccaaggagccctctagagctgagatggtcctttaagttctctcaaatggaagcaaggcggatagacatttatatccctacagcagctagccattagctgtgggaccattctctgcagaaggaagtgtaaccttgggcaggagttctctgtggcagagccaattcccagtgtgggatgcagctgtgaaccctcagcaattgggaactgggtgcatccaccctcaaaagagaatctggacagagtacaacagcactacagccacattgcagtccaactctcagccccactgagaatgcaaaagatgaacaagaatgtcttttaaacacattttcttcttttgcttgtcaattttcagttcgtagcctagatatttccagtgtagcaacaaagacatttcaacagtggtcacagcaatggtaaaattggacacaaataaaaatggaaagttttgacagttttagctgcatttagttaaatattgtgtttatgctcattatttggcatagctcctgttgttcttgagagtatttcagaatatgcttatttaattttctttctttgccatttttactttattttttccaccacatttacttttctgcagttaactgacaataaaaacagaagtggaggagctcagaagtctaccccaaatgggccgggcgtggtggctcacgcctgtgatcccagcactttgggaggccgaggcgggtggatcacgaggtcaggagatcgagaccatcctggctaacacagtgaaaccccgtctctactaaaaatacaaaaaattagccgggcgaggtggcgggcacctgtagtcccagctacgcgggaggctgaggcaggagaatggcgtgaacccgggaggtggatcttgcagtgagccgagatggtgccactgcgctccagcctgggcgacagcaagactccttctcaaaaaaaaaaaaaaaaaaaaaaaaagtctaccccaaatgttccccaagcatgcattagtgacttcaaataccatcacttccgtattacattttgtctcccttatattcctaatgaggcttacctgcttttggttcttaggaaaaggtctgggtggaaaatatcagctattcttgccctagagagtcttgaagcaaacactaacatccactgtcaagcaaatgaaaagtctaaaagataggacagagaagctgttaagctttaccccaactgaaagtttgagttgaactaacttggacttgttctgctgactggctgtgcagttttggtgatattttattagtttttccttccttcaaaattatgcaaaggtcatggtccatcatgaagttttatttttaatgttctatttctttttgttgttatcaatcaaagaacattattgcctgaaatagttttcccattagattaggatgttaattggttgacagaaataattgcttaaaatgaaagaacctcctcttgctgctcaaagccgaggagcctgatactgtttgtgatacaggccattggtaaatactgttgacttgtgacctgtggttccccattcacttgttcttttttggaaggaacaagatgctcttcctgcctggggctttgctctgctcagctatgccaccctctgaaacatgtgatctgcattccaaatgcttcactgacaggttctctatcacccagcacaggtagatcactgtcattggcatctatgtgagtgatgagttctgtttcatcataaataacctgaatattcatgtcctagactattggtgacactggaaccttcctattcatgaatacaatactaagaacattgcatatacctattttgctatagtgagaaaagccctcaaatctcactctcaatattatagtaccctcccacccctccacccacaattttcaatgtttgattactctataaaaggtagataattatctgaatttataaacaacataaataattctcaaacatttcacacagcaactacagcatgagggttgagtcaatcagtcttaacagacactcttaaattcatctccagagcatttagcgagactgagaaagaagaaaaattctccgcattctaacattttcgtcctaggtgagaatatttgcagtcagaagctttaaaattgctgacagtggccaccacatgtctcctgggaatgtccacattctctctgcacaggggtgcctacttttttattttttatttttgagacagagtctccttctgtcgcccaggctggagtgcagtggcatgatctcagctcactggaagctccgcctcccaagttcacaccattctcctgcctcagcctccggagtagctgggactacaggcgcccgccaccatgcccggctaatttttttgtattttttttttttttttttttttttagtagagacgggatttcaccgtattagccaggatggtctccatcttctgacctcgtgatccacccacctcggcctcccaaagtgctgggatcacaggcgtgagcccttgtgcccggccaggggtgcctactttttatagagagatatataggggctaggccacagttgcacaatcccatttaaccagaactctcagagccagagaatatagacagccctgaaacatgagaaggattgagcataagcaatatttcagaagctgtttaaacatgtcattatctggcttttctatttcagtaatttgtaagcaagctgcctcctctataaacacatcagcaggaaaggagaaagccatgttagttattgcatctctactgcctgggacttggggagacaacatcaattttaatgcattgaaatgcagaagtatctttgagggaatcccatttggattggatctctttgagggaatcccttatttggaataagaccactggaaaagtctgggctactttaaggaaagtggagagatgttcattttataagactgaacttgcacatatttccatgagtgaataaagcaaatattaactaatggttttttttttttttttttgagacggagtctcgctctttcgcccaggccagagtgcagtggcgtgatctcagctcactgcaagctccgcctcccgggttcacgccattctcctgcctcagcctccagaatagctgggactacaggcgcccaccaccgtgcctggcaaattttttgtatttttagtagagacgaggtttcaccgtgttaaccaggatggtctcgatctcctgacctcgtgatccacccgccttggtctcccaaagtgctgagattacaggcgtgagccaccacgcccggccaactaatggtttttagctaacgttttccagcaagatttgggaatagaaatgtgaacagaagctcagcataattacttattgttctgtcctgctatgagcattacttatttcacacatgattatggtgaagtcttcaggctgagtctaagctacgctcatcattgggttcctacacatttgggtgcgtcttgagtcctgaaggagtcttttgagatggtagcaggggtcctgagtgtagcatgtgtctattacttttccctgggtggccataggtcctcatcctgggccctatgaagagggactacaagacaaaaattaaatataaaagagttgttttctaaaacttttctaaggtatgtaactcacgacagcactactttaaaggttttattgcagagtacagccagacccacctggacttagctatgagggaaagttggaaaggatgccagtcacattgtgtggccactgacactcttggtgtcagcataaattgtgctgtgccctttagacaaagaattgatggctgcctggcaacctttctgtattgtctctattactagtggttctcaactagtggaaattttgcttgccaggggacatctggaaatgcccagagatatttttagttatcacagcttgaaggaatgtaagtggttggggggagttttgcccaatgaagggatgcatttgctcaggttgcttgggcttgcttacagcatggcaaccagattttatgaacaaagccccaaacttggcatttttataactaaccttggaagtcacattgattcacttctgccatggtctgttggacaaagaagtcacaagggtccaactacatttaaaggaagaggacatagatactgcaagttcatgggagggatatcaagattgcattgtaagaaaaacaagcatgttgggagatattgttgtggccacctttggaaattacaatctactgtaagtaaaacaagaatcaatcaatataaatttaggcttgaatcacttctctttttttgaacgaaagataaaactgtaaagaaatatagagatacatggaaggatgatgttaaatcaatacaaaatgatcagtgagttaaaagttacaggttctaggaaacatggctggtgaatacaataataatttattaattttaatgtcagcttcaaatttttggttctttggaaaattgtttaggcccccaaatatataggtctatgtatgtatgtatgtatgtatgtatgtatgtatgtatgtatgcatgcatgtatgcatgcatgcatgtatgtatgtatgtatgtatgtatgtatgtatctatctatctatctatctatctatctatctatctatctatctatctatagctgcattgatgctgtaagtccagagcagttttgcaaaataggctgtgttgctagagagatgctattttccttggcctgtttttaagctgctatccaatagaacatattttttttcctggttgagaaaaaactggatatgatcaatataaaaaactggacaagacactgtgtggtattggttggtaatcagacaaagcttcttgctgtggagcacaccttcctttgatgtcatttgtctccatttattggaatgaaaacttctcagtgtatgaatctttagcaaacaaaatgaagaatgctgaaaagaagcacgtagcacatacacttgaaaaattagggagaaacaacattagcagaaaaatgttctttctgtttcacctgagataagtagcctatgaaatcttgtaatcattgaaatcataattttttttctttttctttttttttgttttttctgagacagggtctggctctgttgccccggctagagggcagtgctgcaatcacggctcatcgcagccttaatctcctgggctcaaacgatactcctgcctcagcctcctgagtagctggcactacaggcatgcgtcaccatgccaagctaatttttaatttttttttttttttgtagagatggggtttcaccatgttgtccaggctggtattgaactcctggactcaagtgatcagatcgcctcagcctcccaaagtgctgggattccaggcataagccaccatgcccagcctgaaattatgattttcaatagaactattggctactgttagatttgaatttcacagattgagtctggtaaactcattggtgcttattttgcagactgtactatcggtctcagcattgaacttttagagatttcttaaatgacgttatgggattatcttgcacatcgacattataataaattccttcaagggcagcccttgactgaagtaattttcataattacgttgacctgaaaaaatatccttgcaagagacactgtgcccatatatcacagaaatacaggtattgatcatcatgtaaagggaggactgtgccagtgttggctgcagaaggtgggaagatctgcagactctttttgttagaaactgttgcagattaggttccccaggaaacagactctgaaatagagatttgtatgcaggttttttggaggagtgctcttgggatcaatactctggaagaataaagaaagtagaattgggcagagggagaagttgaactttgatatagatgcaacaaaggcctcagcttattccatgggtcacagtggagttggggtagccctagaatgaaccaaatagaggttaaggggtcagtaccttatacattgatgttgaccatcactggacgtgggctgacgcagaagaagggtcagaactttgggtaaaatgactctctttagacaccggcagttcttggaatgaggctctgctgagaattctcagcaatcagtgtttgcagcaggtaggggaataattgtctcagttctgaagagggcattcctcagcatctactgcaaaagcttatttgaactgctgaggaatacagcacaattaatataaacctaggttctctaacgtagattatgatgaaagccttattttgaaggaatacagtttcattcaaaacccatcagcatcaagcccaagatctctcatactcgtaatatcatcaggtgatactggttaattccatggcagtgaaatgttagatttgtgccatttccagaagttcttgtgtaagatgcttcaacttctgcagattcacaacagttgtcatacttattgtgagatgaatgcatctccaagatagagatgtatgcattcgggatgaatttgttaataatcataaagacagtttaaagcatcaaggatgtttgtttttaaggccctttgtcctgctgctgaaggccaaattggtagcctggggttaaagctaaaaggctgtgttgtctgttttatctctgtatggaaaaattttgacttgccatctcaagagagccatcacagatgtctcctaagaaagaactggttcacattttggctttaacaccatcagaatgatctgattatagattctcatccataaggagatagtatatagtggttaaaagcatagactgctcaattcagagcacagttctgtcatttttttttcttagtgtccttgggaaaatcaagctctgtgtttctcagttttctcatctctaaaaatgggtataataatattgttataataatagtacctccctcattgcattttaaagattaaatgataaatatatgtgcatgacagaggaagtgatttgcaggtgtttgctattatactgctctgttttttttttttaaataagaatgagccagctttttctgtattaaattactgtaccatttgtcaatttgctggaggtgcaccttttgctgtaaggaaaaaaataaaatgaataatgttgattgaaacaaaagtaagtatttttgaataatcttggagttgacatttgaagattttccttagctctgtccatatggatcaggaaaagatgtaaaacaaacaaaaaaaaccttagtctagatctttgctgaaagagggtgagattgggagtttacttttgtgaagaacctgtgtctcacatctttgatgtattgtctcaattaatcatcagaactgtcctatgaggttggcactgtaattttctcctttctgcagacagaaaccaccccccgccgacaaaaaaaaaaacaaaaaaaaacccaagacaacaagaggttatgagtagaaaccagagcagagttttggctgtgaaagaaagtaagtcagtgtgacattactgcaatgctgcagagatagacccctatcatgtaatcacagtctgacaagatgtgtacagaatgcagatgagctggagtacttgtcacatgatgaccggctgcaaaggtgtttctcttggggtgacagcagaaccattaactttactttctctgaaatcatcttttttttgggggggtagttagctagttacttcaatagaataaaaagaatgaaaactcatttagcgatataattactaaattattgggcatatgtctctttaaaaatgtaatgcaaagccattcttgtgaaatagtgtttttggtgcccccaccccatacaccgttaaagattaagttgactaagcaagaaaaggtgttaacatttttgtcagagacccctgggaatcaatatatttttgttccaagtcaccttgtattgtagttctctctggatatttggagaaagaggagatagctagattaaagaacttttgtggtgaaaattactccacttgaaggcttgtctctatcttttctgcttcagaactttatgttgattttgtgtgtcggcttgcatttttaaaaactataatatggaatagaactacatttaaatcagggaaaaaagatacatatgtggttttgaaatttctaaaattttgcatttggatagttcctctgcagttgctcagttaacatattttctttttctataaataaaatgacttgcgatcttctctctattctaggaagtctcaaagctcttcccaaggagtaaatcttgacagaaaaagaaaagcaaatttttggggggaaaattgtgaaaaagagtattaaattatttaaaaatagactgatctggaaatcatggaggaaatgatgtttacactgtgtttaaaaaataaaaaacgactcagtggatatgcatggtcctttgcacttaataagctaaagaggttcagatggaggatgatacagtataattaaaataaaagcggggaatgaccacgaatcagtcatggtaaatcaaaagaataaagacatgaaaagactttttggtatatatcaaaccatttttgaaaaagaattatgtggctagagagagtaacaatgaaaaagatatgtagaaaaatttctaaaatataaaaaatattatgtttacacagctgataagtttttatatagtaaatatactaatatcagtgcccttctcctggttcctttgaatacaagattaatgcaaaatattttttaaaaatgtatcctcttttgagccagtgaaaagtgacactttttttttaaacgaagtcacttagaattatgaccagatggttaaagaagataaattttaagagttgatttttcaaattttaaaggaaactgctgttggttttcagtgtggttcagtgagcttcatagtgcatatttgcatatgaaaaatgcttccataatattgtatttaatttactggcaaacggctcgaatatatattgtgggtttacaatgccaaaatacccagttgatttgataaagctacaagtaaattttggagttgaagagaagggagtaataaatcagttatctgtcaacttgcagaacaaagaaaatacttacttacttccccatccccccaactcctttaaactggttgaattcatattgtttagacaaaatgtgattgcattagtgattagttattgattaatcatcttataaagattaaattatttgatttctttaattagttgattttttaaaaattggcagtgaaatccttgaaaaacattagacctatgtaaatagagcctgagtaaatactcacataatatttaaccaatatttggacacactaccaaggcatcttgttaaggtattgaactaatgactgaattctccaaccactgaaaaaaatgagtgatggactaattatgtaaaaatgtcttttatcctgcatgtgattaaattggtctgttatttgaatgaaggaacaaacctttctggttgtactatccaaatcattatcatgcaggcaccatttctgttatttaaatgtaattttgtcaactgtagacatcattgttgcttctccagcattaattccattactgccctgtgatagagcagctgctgacctggataattgacatgatctccagcttcagaagcggactctaattggctcagcccaaaatgcaatcccatctccttggttccagtaattggttcaggagtgtcacatgacatgaactgttctaatcagagtgaagaccatgatatttattcaaagttgtctctccttttgtgtggtgtggtgtgttgatgtgaggcctggaattgctgtagatactttgctatctagtctcaggataaagctgacacatcagggtgtgcggagagatcagtgaattacagagaaatagacgggagccctgatcaaaccatgccagaagcctaaaggtcttttgaacttcattagctgatgcattccatttattattattcagttcatttattttatctctatatatcatatataaatataataaacttatactatgttataaatgtttattatatttatataacttattacattatgttataaatatttactatatttattagtcagtttgtgttgggccctttagtatgtacaaatgaaatcatcctaagagtttcaacgactcaacagcaccatggccaggacctattattggtccttcatcttcacttccctacacaaaatcactaatatgagattcttttctcttctagctgcttctaagttgagtttgaggtacagcgaggtgtgaaggtaaagaaagctctccataccttagctttgaataaaccttcaaatatttggatgtagtataatttatttaactctttattttgaaataattatagatctataagaaactgcaaaaatagcacctagagtgcctcgaatccttcccttcattaccctcaatggtgaataatatataatcacagttcaatatcaaagcaagaaaactgacattggtgtaatactgagcaatgtttattttattttatttatattatattatattatattatattatattatattatttttgagacagagtttctcctctgtcggccaggctggagtgcagtggcacgatcttggatcactgcaacctccaccttccaggctcaagcgattctcctgcctcagcctcctgagtagctgggattacaggactgtgccaccacgctgggctaatttttgtatttttaatagagaaagggtttcaccatgttggccaggctggttgtgaactcctgacctcaggtaatttgctcacctctgcctcccaaagtgctgggattacaggcatgagccaccgcgcctggcccaatgtttattttttagtagaatgatttttgttttgagagaagttttgaaataaacactaataattcattcattcttatagctgggacattcattttagtaggttagcatatatatgctatatatatgtatatatgtgtgtatatatatacatgccatacatatgtatatatgttagtacacacatgccttcatgcaaagatacatatatctatttagaggatcagagtattattcaaatatttagattaatacattgtaaatagttgtagctttttttggacatattactaagcacatctgtaatttatttttattttttaatttctttttttgatacataataattgtacatattttcagcgtacatgtggttttctctttgccttctaggataccaaaactgaatagttcatcactttatggttccctaatattaagtagggttcactcattctttttaattcttttttctttatttttatctaactgagttatttcaataggcctgcttcaagttctgagatttttttttcttctgcctgatctgatctattgttgaagtgttcaagcgtattttttattttacttagtgaattcttcaattccaggatttctgttatttttaatgacatccattatttggcaatttttaaattcatgtgctgaattgtttttctgatttctttgcattgtttatctgtgttctcttctgtctcagtaaatttttttttttatttttatttttccagacagagtctcattctgttgcccaagctggagtgtagtggcatgatcttggctcactgcaacctatgcctcccaggttcaagtgattctcctgcctcagcctcctgagtagctgggactaccagtgcctaccatcacacccagctaatttgtgtatttttagtagagatggggttttaccatgttgaccaggctgttctcgaactcctgacctcaagtgatctgccagccttggcctcccaaagtgctggaattacaggcctgagttaccacacccagtctatctcactgagttttaaaaatatcactgtattttatattcctttcagtatacatacccaccaatgggattgctgggtcaaatgttagttgttttaggttctttgagaattttccaaactgcttttcacagtggctgaactaatttacattcacaccagaagtgtataagcattatactttctcagtaaccttcttaacatcttattttttgagtttctaataattgtcattttgactggtgtgagatagtatctcatggttttgatttgcatttctctaatgattagtgatgttgagtatttttttgtatacttattcaccatgtgtatgtccacttctgagaagtgtctgttcatgtctgtttcccatttttaaatggggttgtttgttctttgcttgttaattggcttacattccttatagactcttgatattagacctctgttaatgtatagtttgcaaatattttctcttattctgtaatttgtctgtttactctgttgatagtttcttttgctgtgcagagctctttaattaggttccattttttcttgatattgcttttggagacttataaatcattctaccaaaatgacacatgtacttgtatattcattgcagcactactcacaataacaaaggcatagaatcaacctagatacccatcagtggtggtctggataaagaaaatatggtacatatacactatggaatactaagcaatcacacatacacaaaaacaaaatcatgtcctttgcagcagcatagatgcagttggaatccattctcctaagcaaactaatgcaagaacagaaaactaaataccatgtgttctcacttataagtgggagctaagcactgagtacacatggacatagtgtgtactcaggaataataggcaccggagattactaaaggagggagagaggagtggggcaagggctgaaaaattacctgttggatactatggtcactacctgggtgatgggagcatttgtacccaaaacttcagcatcacacaacatacccatgtaaaaacctgcacatgtactccctgaatctaaaataaaagttgaaatttttttaaaaagaatgagttcacctaggatatactgcattttaaaataatttgatttttaaaaaatttaatttttaaactaatagtaaaattaactatttttggtgtacagttgaaacaattttaacacataaacagatttgaattcccatattataatctggatgagaagttttactaccctagaaatttcccttttgctcttcctttgtagtcaccccttcacctctcctccatcctctcaacccttggcaaatactgacctattttctgtcactctagttttgtgttttaaagaatgtcatctaaacagaattataaagtgtgtacacttttgagacttgacttttttcactaggcatgtttttgacattcattcaagttgttgcatataaaagtagttcattcttttttattgctgagtagtattccattctatggatgtatcacagtttgtttattcattgatttattgaagtgcatttgcattttttcccagtttttggtgattatcactagaactgctataagattcatgtgcagattttattgtgaacacaagttttgatttctctggtttaaattcccaggaatgcaattgcttaatcatatggtaagtatgtgtaattttataaaaaaatgttaagttgttttcaagagtgactttaccattttgcattcctgccagcaatatacaagagttacagatggtctgtctccttgtcaaataaaattgtttatttttagccattctaatagatgtgtggtgatatctgctagtgattttaatttgcatatccctaacaactaatgatcaatgttaaatatcttttcatgttcttttgaatcatctgtataccttctttggtgaagtttctgttcaagtctttgagttttaaaattggattattttcatactggtgagtttacaaggttctttatatgttctggatacaagtacttgttggatatgattttcaatattttctcttagtctgtagcttatctttttagcctcttagtggcgtttttcacagagtgaaagtgtttaattttgatgaaatatggtttatgagtttgtttcttgttggactaatgcttttgatataatgccaaaggacactttggctaattgaggtgataaagattttctccaattttttgaaatgttctatagttttacactttgatttaggtccatgatttttttaagttcgattttctgtgaggtataaggtttaagctgaggttcattttttatgtatgtatgtacaatttgtccaatcgtttgtggaaatgatgatcttttcacgatttgattgcctttccacttttgtaaaagaaatcagttggctcaagggaatgaaaagacaaaccacaaattaggagaaaatatttgcaaaaatatacctgataaaggactgtttcccataatatacaaataacttaaaattcaatgataagaaaaaataaagtcaataaagaatatattgatggaaaatgaacagaggaaaagatgttttgtatcatgtatcatttgggaattgcaaattaaaaccatgagatacggctctacatctgttccctgtcactatagacacctattagaacagctgagattcaaaacactgaacgcaaatgctggtgaggatgtggtgtaacagggatgctcattcattcatttctggtcagaatgcaaagtggtacagccacttttcaagatagtttagtagtttttcacaaacctaaatgtacttttatcatacagcctagcagttgtgctcttggtatttatagaaatgaattgaaaacttatatccacacaaaagcatgtacacagatgtttttagcaagtttcttcataattaccaaaacttggtagcaaataattttttttttgacagagtctcgctctgtcacccaggatagagtacagtggtgcgatctcagctcactgcaatttccatctcccaggttcaagcagttctgcctcagcctcccaagtagcttggattacaggagcacgccaccatgcctgctaatttttgtatttttagtggagatggggtttcaccatgttggccagcctggtctcaaactcttgacctcaggtgatccacctgcctcagcctcacaaagtgctgagattacaagcgtgagccaccatgccccagccccaagtgttttttaatagtgagtagataaataaaccgtggtatattcaggaaatggaaatttattccgcgttgaaaagaaatgagctatcaagccatgaaaagatatggaggaaacttaaatgcatattagaaagttaaagaagcccatattaaagtgttacttgttgcagagggtccaactatatgacattctagaaaaggaaaaactatggagacaataaaaatatcagtggtgccaggggcttgtgggtgtagagatagatgaacaaacagagcacagagaatttttagaaaaaaaacgaattgtccatatatgtgggagtctacttctggattccattctgttttattgctttatggtttttttgttttttgttttttttttttttttgatggagtcccactctgtcacccaggctggagtgcaatgacacgatctctgctcactgcaacctctgcctcctgggtttaagcaattctcttgccgcagcctcttgagtagctgggattacaggcacctgccaccatacctggctattttttttttgtaattttagtaaagatggggtctcaccatgttggctaggctggtgttgaactcctgacctcaggtaatacgccgcctcggcctctcaaaatgctgggattacaggtgtgagccaccatgcccagcctgttttatgtttttatccctccaccaatagcataagacagctttatagttagtcagcctatttcataatatagctttatagtaggatgtctatagtagtgttcttggtgttgcgggttactttcaattgttcctttaatgtgaagttttgtatcacttcttctaagtcatcttcatcctttttgtcactactacattccttatttatgtcaataggtttaccttctatcagttcttctggctgcatatctggagttccttgaaagcaacagtgtattaatctgttctcacactgctataaagaactacctgagactgggtaatttatgaagaaaagaggtttaattgactcacagttctgctggcttaacaggaagcatgattgagggcttcaggaaacttacagtcatggcagaaggtgaaggggaaggaatcacgttcttcacatggcagcaggagaaagagagcaaagggggaagtgctacacactttcaaacaaccagatctcgtgagaactcattcactatcacaagaacagcaagggggaagtctgcctccatgattcaatcacctcccaccaggtccctcctccaacacatggggattacaatttgatatgagattggggtggggacacagagtgaaaccatataaagcagtatcaacattctatcgtcagctatttcctctataactccatctgtgttgcattcagatttaacttctttctgtgctttcatttttgttggacaattttctcttttcattatccattaaaaaaagtcacatgggtttatcactaaggggaccaggagacaacatgactacatgctctgctatctgtgcatgaattgcataatgtacagtgataatcactgatagatattaaaataagttattgattagtcatgtatcatgatgcatatctgttattatgtagtgatttgtggactaaaatgctggaagcaaaacttgtactttatgaaattattcacatgtataccatagtaactgaaatttgaacagaatgatatgatttggctctgtccccacccaatctcatcttaaattcccacgcattgtgagagggacccagtgagaggtaattgaatcatggggggaggtctttcctgtgctgttctcctgatagtgaataagtctcatgagatccgataactatttaagggggagtttctctgcacaagctctcttctcttctctgccaccatgtgagacatgactttcaccttctgccataattgtgaggcctccccagccacatggaactgtaagtccattaaacctctttcttttgtaaatttcccagtctcacgtatgtctttatcagcagtgtgaaaacagacaaatacagtagctaatgcagtgttcggagggaaatttatggcaataaatgctcacacccacagaccaagaacagctgactttgaacactgttcacacaaagactttgaacagctccaatatacatgactttcagctaccactgtttaattaaatgtatcagtctctcaacaatactgttcaaatttcagttactatagtatacatgttgttaataattccataaagtacaagttctctagggagttccaaactttcccacattttgctgtcttctgagccctccaaactgttgcaacctctgcctgttacccagttccaaagttgcctccacattttttgggatcttttcagtagcatccctctctactggcaccaatttactgtattagtctgctttcacactgctgataaagacatactcgagactgagcaatttacaaaagaaagaggtttaatggacttacagttccatgtgcctggagaggcctcacaatcatggtggaaggtgaaaggcatgtctcacacggcagcagacaaaagaagacagcttatgcagggaaactcccccttatgtaatcatcagatctagtgagacttattcactatcatgagaacaacacaggaaagacctgccccatgatccaattacctcccaccgggtccctcccacaacatgtgggaattcaagaatatcagctacacttgcaaattttgatatgctatattttcattgttgttcacttcaaattattttataattttccttgagattttttttcacccatggtttacttggaagtttgtcttttaatttctaaaggtgtataatttttcctactatatttctgttatttctaatttaattccattatttcagagaacattcttcgtatgatttaagttctttgaatttgttaaggtgtattttataaccctggatatagtctattttttttatctgttccatgtgcatagaaagaaaatctattctgctgttgtttggtagaatgttttataaatgtcacttaattacagttgttagatggtgttggtcagttcttttatatccttgatgactttctgtctactatgtctattgcttgacgatagaggggttttgaagactccaattataattgtggacttacctatttattctttcagttctgtcagtttctgcttcttgtattttgaagctctgttcttagttgcatacatgtttaggattgtattgtctttggggtgaatgaactcttttatcattatgtaatttgcctttctatccctgattttttaaatctctgagtctattttttctaatgttaagtctactactccagctttattttgattagtagtttcatgatttatctttctctgttgtttcacttttaaatgacatagttcattaaaatgagtttcttggagacagcatgttattagaccattaaaaaatctgttctgacaacttccatattttaagtgacatacttggatcacttatatttagtgtaatttattgatgtatttgggtttaggtttaccatttattatttgttttattctatttctagtctttgtattcttgcttcgctttccctgctttattgtgtcttatctgaacatttaaaaattcagtttagttcatccaatgtatttttactattttttacatagtttattttatgattgctgtagaaattataatatgcatgcttaagtttttgcagtctacttagaaccatttttttcctacttcagacgggattcagacaacatcacataggttctaaaatgattgcttttaaaaaaactggatctttgattaaccatgtaatgcagacccatccttataacttttcttatgtcttagaagtatattacccaacatatagatattggtaagttaaagaaaaatactattttactctaaacaaatctattataatatcactactttagaaataagctatttgttaaaataatttgatgtgtatagagcagaggcttattaatattgaatgcatttatgaagatagaatttgatttacagggatttcccccctccaaataactgaataagtgagtgaattagcatacacttaacatagaaaatgagttttctgtgcatcaaaacgtattcacagaaaaactttcatttgtgatacttcttataactagtttctggaaaaagaaaataactgaattgtgactttttgacatagttaataaaaatgttgtctaccttttaaattctaataatactttagaacaggaattaaagtatggcttttattacaacaatatcaattagcatgtatgtgttgtttattttcatattttaattgctacttctaaacaactatataaaattaattccttcttaatatgagaaaactgaaaaatggagaagttaagtaatttcccaagatcatacatcttgagtaaaagaggcagaatgaaaattgagtagtatggcttcagaactcacaccgtgaagcaccatattatctgatccttagaggagagggcagtagtattttggtattctcaacttaagaatctttaaagttatttttaaaaagaagggcaatatgttgtatgtgtgtctttgtgtgagtgtcagtgtgtgtgttatgtatgtatatttctgtataattttttatcacaataagtttctaatttggttaaggattttgtgttgcttccataatgagaaaacgattctatcaggcattagtgtattctaatgctttgatgtttactttcaggcttccctttgatctctttacatattgatatgtgtacaaatagcatgggacaaccatgtcttgaatgccacatctaagaatggccacaagattacagtcttaaaactttaatgagcagaacccaaattggtaacattatgcatgtgatgataattgctctctaaagcggatcttttctcatgccattctccatttttttgaaggcttaatttaagaacactattcaccagcagttaaatggctactttattcttttctactttatttatttcccattctttttcagatgttgctttctgtaaatactggtctgaaaggaaaggttcagcaaatcaaattgttgaaggttgcaatgtctgagaatcggaaccagctttgctggtataaaatatgtaaaaggacattcccattatagaaatatacttttcttattctccagtaaaaaaataggaatatattaggcactacattcttcaaataatttgaaaattctactattctaatacatgatatgaaatgtcttaataagaaattgaacttaggatggataaatcttttgtgagaaaatgtgcctacagatattagacttctttcattcatcacttacctaatccctgtccctttctagatgttgacaaaacagaaaatgacaggtgattcctttgcagtatttacaatgctttgatatttatttttgtctttaataataatcatctatgaaaatttctgagacattttttccactatctaaacttcagtttttatttcctccttgttcatcagctatctctcttttcaattatttcattttagtatatgttggacttttaaagattggctttaatataaaaatgtacataatttcatggtaggagagttttcacagattgggcagaatcatgcaacatattcttttaataggcatttagaaaaagaaatcttagtacacattcgtatgtacactaaatagttctaatattttatgtgtttgataaatatgatgatcctggaaaatacatagcaatggtagtcccagttagacaaactttccattataattacactggccacaaaggcagtttgtttacatggcatcaaagagcctcacttgctacaccattgctaaatcctgagccctaggttttcatcagtgtcagttataatccaatgagatcaaaggtgaaggtgtgccaatgaaaaatcactcctgaccttccatcatggcagacaggaggcaggattagattgcagctccgactcagatggacagagaagcatgtggtggctagcactgtgaattttagctccagaatgactgcaggaataaatcatgaaaccggagaggacccacagaccctctgaagaaagtggattgcttctgcaggacccaggagacaccctagatactgtgattgcaccaactgtggaagtgggaaagggagatcttctgtccctaaacacacaccccccactggggaaattgaaggtctactttacaggagaagatcctgatcttacctggagctgagtcaatttagagagccaggcaagatgcaggggtacaggaagccatgggaaagccctgtaggctcggtgggtccccaaggccattcttgcctggcattaccgggattcttcaggaaggtggccagaggtgcagggaaaatgccacagggagaaggaaatctccagctgcactttgtaacggtttgaactgattgagaagcctcctggccagaactcgtgtgagggtgtgaatctggcatgcagactccacaggaggaagaacaactaaaaccctcctttctttcatagctgggaggcaggtagcctgaggcaagttctcagccctgcttacccactgcctagaaatagactcagtgctgttagtgggggcacggtgggaaagagagcagcccttcagattgcatggcagctgggtgaggcctgtgactgatggtttcccctacttccctgacaacctgcatgacttagcagaggcagccataattcccctaggtccataactccattgacctccattgaatatcacccccatcccccacagcagccacagcaagatccacccaaagtgagtactacatcaagggaatgccctatgggacaaaagaatctgaacaacaggcttcagccctagaccttctctgtgacagagcctatccaaatgagaaggcaacagaaaaccaactctggtaatatgacaaaacaaggctcttcaacacccccaacaatcacactagttcaccagcaatggatccaaaccaagaggaaatccctgatttacctgaaaaagaattcatgatgttagttagtaagctaatcagagaggcaccagagaaaggcaaagtgcagtgcaaggaaatccaaaaaataatacaaaaagtgaagggagaaatattcaatgaaataatataaataaaaaataatcaaaacttcaggaaatattagacacacttatagaaatgcaaaatgctctgcgaagtctcagcaatagaattgaacaagtagaatgaagaaattcagagatcaaagacaaggtctttaacccaatccaacaaagacaaagaaaaaagaataagaaaatatgaacaaagcctccaataagcctgtgattatgttaaacaaccaaacctaagaataatcaacattcctgaggaagaagagaaatctaaaagtctggaaaacatatttgttggaataatcaaggaaaacttctccagctttgctagagacctagacatccaaatacaagaagcacagagaacacctgggaaattcattgcaaaaagatcatcatgtaggcacattgtcgtcaggttatctaaagttaagatgaaagagagaatcttaagagatgtgagacaaaagcaccaggtaacccataaaggaaaacctatcagattaacagcaaatttctcagcagaaaccctacaagctacaggacattgggacccaatcttcagcctcttcaaacaaaataattatcagccaagaattttgtatccagtgaaactgagcatcatgtatgaaggaaagatacagtctttttcaaacaaacaaatgctgagagaatttgccactaccaagctactactacatgaactgctaaaaggagctctaaatcttgaaacaaatcctggaaacacatcaaaacagaacctctttaatgcatacatctcacaggacctataaaacaaaaatgcaatttaaaaaacaaaaacaaaacgcagaaaaccaaggtacacgggcaacagatagcatgatgaatggagtggtacctcacatatcaatactaacattgaatgtaaatggcctaaatgcttcactttaaagatacagaatgcagaatgctaagaattcaccaaccaactatttgttgccttcaagagactcatctaacacataatgacttacataaactgaaagtaaaggggtggaagaggcatcatgcaaaaggataccaaaagcaagccagggtagttattcctatatcagacaaaacaaactttaaagaaacagcagttaaaaaaacaaagaaggacattatataatggtaaaaggccttgtccaacaggaaactatcacaatcctaaacatatatgtacctaacattggagctcccaaaattataaaacaattactaatagacctaagaaattactaatagacctgagcaacacagtaatagtgggggacttcaatactccactgacagcactagacaggtcatcatgacagaaagtcaacaaataaacaatggatttaaactataccttggaaaaaatagatttaacagatatatacagaatattccatccaacaacagcagaatacacattctattcaacagcccatggacctttctccaagataaaacatatgataggtcactaaaagagcctcaatacatttaagaaaattgaaattatatgaagcactctctgagaccacagtggaataaaactggaaatcaacttcaaaaggaaccttcaaaaccctggaaatacatggaaattaaataacctactcctgaatgattattgggtcaaaaaatcaagatggaaatttaaaatattttttgaattgaatgacaatagtgacaaaacctatcaaaacctctgggttacagcaaaggtggtgataagaggaaagccccaaatgcctacatcaaaaagactgaaagagcacaaagtgaaaatgtaaggtcacatctcaagaaactagagaaacaagaacaaaccaaactccaaaccagtagaagaaaggaaataaccaagatcagagcagaactaaatgaaattgaaacaaagaaaaacaatacaaaagataaatgaataaaaaagatggtccttcgaaaaggttaataaaattgatagaccattagcaagattagccaagaaaagaaaagagaaaatccaaataacctcaataagaaatgaaacaggagatattacagctgacaccacagaaatacaaaagattattcaaggctaatataaacacctttacacgcataaactagaaaacctagaggagatggatacatttctgaaatgacacaatgctcctagcttaaatcaggaagaattagataccctgaacagatcaataacaagcagtgagattgaaatggtaacttaaaaattaccaacaaaaaaaagtccaggaccagacagattcacagcagaattctacctgacattcaaagaagaattggtaccaatcctattgacactattccacaagatagagaaagaggaaaccctccctaattcattctgtgaagccagcatcaccctaatacccaaaccaggaagggacataaccaaaaaagaaatctatagacatatatccttgatgaacatagacgctaaaatccttaacaaaatactagctaacagaattcaacaacataatcaaaaagataattcactgtgatcaagtgggtttcataccagggatgcagtgatggtttaataagtcaataaatgtgatacaccacgcaaacagaattaaaaacaaaaatcactttatcatctcaatagatgcagaaaaagcattcaacaaaatccagcatcggtttatgattaaagctctcagaaaaatcggcatacaagggacatacttcaatataataaaatccatctatgacaaacccacagccaacataataataaatggggaaaagttgaaagcattccctctgagaactggaacaagacaaggatgccactctcatcactcctcttcaatatagtactggaagtcctagccagagcaatcagacgagagagagaaaaaaaaaagggcattcaaattggtaaaaaggaagtcaaactgtcactttttgctgatgatatgatcatttacctcaaaaaccctaaagactcctccagaaagcccctagaactgataaaagaattcagcaaagtttctggatacaaaattaatgtacacaaatcagtagctcttctataagccaacagtgaccaagcggagaatcaaatcaagaactcaaccccttttataatagctgcaacaaacaaacaaacaaacaaacacacacttaggaatatacctaaggaggtgaatgacctctacaaggcaaactagaaaacactgctgaaagatatcatagatgacagaaacaaatggaaacacatcccactctcatagataggtagaatccagattgtgaaaatgaccatactgccaaaagcaatctacaaattaaacacaattcccatcaaaataccaccatcattcttcatatagttagaaaaaacaattctataattcatataaaaccaaaaaagagcccacacaaccaaagcaagaataagcaaaaagaacaaatctggaggcatcacattacctgatttcaaactacattataaggccatagtcaccaaaacagcatggtacttgtatgaaaatgggcatgtagaccaatggaacacagcagagaacccagaaataagcccaaatacttgcagccaacttatcttcaacaaagcaaacaaagacataaagttgggggaaggacagccttttcaacaaatgctgctgggataattggcaagcaacatgtaagagaatgaaactggatcctcatctctcatcttatacaaaaaaatcaattcaagatggattaaggagttaaatctaaagcctgaaactataaaaattctagacgacaacattggaaaagcccttctagacattggcttaggcaaggatttcatgaccaagaaccgtaaagcaaatgcaataaaaacaaagataaatagctgggacttaattaaactaaagagcttttgcatggcaaaaggaacagtcagcagagtagacagacaacccacagagtggtagaaaatcttcacaatctatgcatctgacaaaggagtaatatccagaatctacaacaaactcaaacaatcccatcaaaaagtgggctaaggacatgaataggtcattctcaaaagaagatatgcaaatggccaacaaacatgtgaaaaatgctcaacatcactaattatcagggaaatgcaaatcaatatcacaatgcgataccaccttactcctgcaagaatagccataatcaaaaaataaaaaaatggtagatgttggcatggatgtggtgatcaaggaacacttgtacactgctggtagtaatgtaaactagtacaactactatggaaaacagtgtggagattccttaaagaactaaaggtagaactaccatttgatccagcaatcccactactgggtatctacccagaggaaagaagtcattatacagaaaagatacttgtacacacaggtttatagcagcaaaattcacaattgcaaaatcgtggaaccaaccaaaatgcccatcaatcaatgagtggataaagaaactattctgttggaacaattaatggaattatctctttgaagagtcccagactgagtcaaaaaaccatatatatatacatgtatatatatatatatgtgcatacatatatacatgtatatatatgcgcatacatatatacatgtatatatatgcgcatacatatatacatgtatatatatgcgcatacatatatacatgtatatatatgcgcacacatatacacacatatatgtgcacacatatacacacacgtgtgcacacacatacacacatgtgcacacacacatgcatacatatatacacatatgtgcatacatatacacacatacgtgcatacatatacacacatatgtgcatacatatacacacatatgtgcatacatacacacacatatgtgcatacatatatacacacatatgcgcatacatatatacacatacatatgtgcatacatatatacacatacatatatacatatatacatatatgtatgtacgtatatatatacatttatatatcacagtttatatatgtgtgtgtgtgtgtgtgtgtgtgtatatatatatatatatatatatgagatggaatactactcagccatagaaaggagtgaattaacagcatttgcagtgacctggatgagattggagactattatgctaagtgaagtaactcaggaatggaaaatcaaacattgtatgttttcactactatgtgggagcttagctatgaggacacaaaagcataagaatgatacaacggaccttgaggacttgggaggaaggatgggagtggggcgagatataaaaaactacaaatagggtgcagtgtatactgctcaggtgatgagtgcaccaaaatctcacaaatcaccaccgaagaatttactcatgtaaccaaacaccacctataccaaaataacctatggaaaaataaaaaataaaaaggaaatgaatttgtagcaacagtccaaattaatagctacaacagaagtgtagtttccaggtagaccaatggataatacattcctttacttgcaagacagcctgcctataatgcagaagaaaaatgcaatagttgggataggctaagttagcctgcggcaacaagcaattccataactttagtggctcacaacggaaaagagtatttctcgttggcactgcatatctatcagctctgttccacgtagtattcactcaggctgttgaggcaaaaggaagaaacgatcatgaactgcaggcgcgaggcactaaaaggagttggaagaaagaatatttggggaaaagtaatatagtgtattagaacaattaatggaattatctctctgaagagtcccaggctgagtcaaaaaaccaggttccacttctttcttggctgcctaattcttaacacttggacaaatttatcttgaacctctctgagcttcattttcacaatccagaaaataaggggatggggtcccatgactcttaaggtgccttccagcttggaagctgtgtgatcagaggctcctgatggctaaaatagggaccctttcaccagctaggacctggaactcatcaccaaagtttttctctaaaaactcttctgaaagacaaatatcacatgttctcacttatatgtggaagctaaaaaaaaataaaaaaaataagaaaataaattaaaaaattgaactcatggagaaggaagtagaatgatggttaccagaagctaggaagggtagcggagagggggtataaagtggggatgattaatgggtacaaattacagttaaatagaatgaataagatccagtattcggtaacacaatggggtgactatagttagcaataatttattgtatatttaaaaataaaacagtgaaattgaaacagccctaacacaaagaaatgataaatgctcgaggtgatggataccgcaattaccctgatgtgatcattacacactgtatgcctatatcgaaatatctcatgtaccttataaatatacataattatattcccataataattaaacattttttaaaagaaaaaagctactcctatatacattaatttatctgactttagcaaaaagagctaggttttttgtacaagtgagataaaaatttcattttgaacaaaggtggcgaggtggccaggcatggtggctcatgcctgtaatcccagcattttgggaggccaaggtgggtgaatcacgaggccaggagttcgagaccagccatgccaacatggtgaaatcctgtctgtactaaaaatacaaataaaatagctgggcatggtggcgggcgcctgtaatcccagctacttgggaggctgaggcaggagaatcgcttgaacctgggaggcagaggttgcagtgagccgagattgcaccattgccctctaacccaggcaacagtgagagactccatctcaaaaaacaaaaaaaggtggagaggtaatctctgacagagatagctaatctgatctctgatcttgttttgataaaagccttgattgctaataatagtcacatcatttttttcatgtaaatttttcctctttctggtgtcatcagaactttcagcaaacatacccttcttcacatgattttccagtgtacttctggttcatagacttaatcacacaatatgaattattcaaatcagcaagaattatgaaggaggaagcaatctcaatattttcctcttgttctcagaatagtgcacactttcccacctctgttttgaagagaagatggaagatgtggatattaaatccaacattgcacacaaatactatggcaaggcagttagtcaataaggattgaaaaaaatacataggagtgtaaattttatcatttcctttgaccattatttaaattattcaaaaattagctgacagtatttttattagatgtaaattttttcttttaagagttggaaaatttcagaccacaggagaagcacatacaggcagattgaaataattaacacatagtttagacaacctttgcatgcttgcatagcccagaatatgttagaatgatgctttccgttgagaatagtggataagagatgattgccatctgggaggagatgaagacggggagatggagagacagatagatgaacaattaatttgacaactatagatatgtcaggttgtatgggaaggcagagcaattaatttaatcccgactgaatagctgggaaggaaaaagaggaaacattgtggagaaaagcacaaaagtctgaatgcttgtgccaatgacctagaagtagagaagaatccagtgtgcctagaaaatagagtgtcggatagaacagtaggaggggcctaggcgatgcgctgtgaagacgaccctggaggccacgctggtgagttttcgcttttttgaaaaggatgagatgtagaaagcggggtggatgagagactttatcactaatggtctgtctctcattggtgaatagatatgagttagttttgatcaaaatgctgaatttgatagacaaaaatttattgttcaaaaatatctgatatggaatatagtttatatcaaatcttttattattttgagacagagttttgctcttgtcgctcaggctggagtgcaatggcatgatctctgctcaccgcaacctctgcctcccgggttcaagcgattctcctgcctcagcctcctgagtagctgggattacaggcatgcaccaccacatccggctaattttgtatttttagtacagatggggtttctccatgttggtcaggcttgtctggatctcccgacctcaggtgatccacccgcctcggcctcccaaagtgctgggattacaggtgtgagccaccgtgcccagccagcttatatcaaatcttattttacattggacttcatgggttttcacctcccatctcctcccaatatgttacttccaaatagtgatttattaaaaaaaaaaccaactctacaaatttgcttctctgactgattctgtgacatttgcccatacgcacacatacaaataaaacaaaagaaaattgggcgtaagaaaatattttttccatactaggttttgagaaaaaattgaaacagattattcaaccactatatacaaaattgaagcagcaagataatttcatgcaaaaaatttctccttatcaagacattttatgcttttaagggaaataaatatgtgttctaaagccataactttgtcctacagagaatttgaagaaatccagtttttccatgatgatgttatccagaatttaattacataattaaagaagatttgctatgattaggaaatatcaaggcatttagaacaagataaattgtagtttcaaaaaagaaattcacacccttctatagatgctccaaggcttttatgcacacgcagaggtttagaacaaattcattcaagcacttaaatggtaaataatcctaacgtgaatatcagttcattcctaaaacatcactgtttttatggaagtttgaaataagattaaaccaatttttatttaagacctataaacggttttgattaaacaactaaattctctttcaaaataaagctaatggccacaaagaatgatatgtatgtaaaggaaaatcttcagcattcttttgcagctgtgtactgcttggctggtggagggctctaatatgaacttggacctctgccgatgggcttgctgcgatgcatgatgtacagacacctgcactgatagccatgagattcatgctgttgtatcaatgtcatacctcacaggcctaacaagtaagtacaaacctaggaagtaagaaaaacattcacactgaaaaaagactagctggggatctgatatttcttagtttgtaacctggacagaagtctcccatacagaactccgctggcaatccagatttgggcatcatcttttcaacaaacatttgagttccttctacgttctagtgaggaggaagttgtagacagcttgggcaaggctcctgctgtaagatagtgtataagacagacattgatgaaatagtaaagaggcaaataagatcattacagattgtgatcattgctatgaagaaaatcagcaagttgatacctaagagagtaaccagggcagggccttatagagaaagtaataggaagagtaaatgaaacgatacagttgaggttaagatttaaggacgtgaatgtgctcgacatccaaaaagccatgaaaaaagaattccagaggaagggcaaaactcttgaagagaaaaggagctttcatttgttcagcaaatgctgttatgcaaaacctaagtgtaatgacaaggagcgaagaaattcatgatctgatagcttttgttcagtatctatcttggccatatcttgagactatggagtggcattgatggcacctatatttctattttatttttattttttattatactttaagttctagggtacatgtgcacaatgtgcaggtttgttacatatgtatacatgtaccatgttggtgtgctgcacccattaacttgtcatttacattaggtttttctcttaatgctatccctttcccctcccccaacaccacaacaggccccagtgtgtgatgttccccaccctgtgtccaagtgttctcattgttcaattcccacctatgagtgggaacatgaggtgtttggttttctgtccttgtgatagtttgcttagaatgatggtttccatccttttttgtggctgcatagtattctgtggtgtatatgtgccacattttctttctctcttttttttttttttgagaaggagtctcgcttggtcgcccaggctgctgtgcagtggcatgatcttggctcactgcaagctctgcctcccggattcacgccatttgcctgcctcagcctcctgagtagctgggactacaggcgcccgccaccatgcccagctaattttttgtatttttagtacagaaggggtttcaccatgttagccaggatggtctcaatctcctgacctcatgatccacctgccttggcctcccaaagtgctgggattacaggcatgagccaccacgcccagccttcatgccacattttcttaatccagtctatcattgatggacatttgggttggttccaagtctttgctattgtggataggatggcacctatatttcaacttcacttttgtagctcatgtgtcctttgaggcagcttgatttttaagaatcaggtgatattagctagaacctcttcccactgggggtaaaagattgggagggggagcagcacaggcaggaaacacagataaaagtgtggcttgcattttttctaatcttttctggcttggagtctttaattttgccaacaaaatgcaggaaatgacatatttagccattttgagaattcttatctttttcctcacctagttgctcccagtgagaactatcaaggacacaaggcatttgtgtaagttgtcaatattaccgaagacatagggtaatagaaagggaggttactgctcagctttatagcagatgaactgttgagctgaatatttcacattctgcttctgtggagtcccttgagcatttccgtcaactcagattctaggtttctttcccatctcttttcttcttccttttaaaaaattaaagaagttttagttgatgaataataattgtatatatttatggggtacaatgtgatgctttcagatatatatacacacatcgttgaataattaaatcaagctgattaacatatccatcaccacctacttagtattttgtgtgtttggtgaaaacatttaaaagctactcaacaattttgaaatatacagtatattattattaacaatggccaccatgctgtgcaatagtttcagttagacaggaggtataagttttagtgatcttcccctttaactgctcccagcaactccaacaaaatcctgcttagcagccttcagagttgccaacatttactccttctttgagggctcagcattgccagttggaatgatggtagctgttggcttggtgtgacttgaaagcctagcctgccccagagtgtttccatcagtggtcagacaacagcatctgcaattcttactattacagcccttcttctgtcttactcatgacctccagaagagccctgagtctgctgcccagaagaagaaaacctcataaccagttttcatgccccatcagccattacaattttttttttaagggaaaagtaattcttcaggttggttggagagtagagacaaagaagggggggaatggaaaaatagcccaagcttctaccaggaaagcagcatgatccatgatgggtcaaccctgagggctagggtaagagtgggagtatgtttagatataggacaaggtggctttgtaggtatagaatggaagcaggaactccaaaggataggtttgtgcatgcgtgcggtacataccgtgcagaggagaaaagatactggcttcaagctttgtgtatggctccctctgatcctataacccagactgactcagtgaccttgcctgaccttagagaaattttgcagacggactacctcatgagctcaccaaagcaaagtagcttggatagttctatattttagctagaggcaagaatctgtactaaatataaaggtttgctgccttgttttttatttgcccttaagaatttttatattcaatataatctatatttttcccccagaaggactcagtagattacctccttattactgatttatttaaaattccagttttagcagagagaggtttctctttagtctttccacagacaggtaaaatgccaaattaaacatgtaaggagtccaagtaaaaggaatactgattaatcggtatcttatttatctttggaacatttagcaatcctctttctttaaatagggaacttatgggccgggtgcggtggctcacgcctgtaatcccagcactttgggaggctgaggcgggtggatcacgaggtcaggagatcgagaccatcctggctaacatggtgaaaccccgtttctactaaaaatacaaaaaattagccagacgtggtggtgggcgcctgtagtcccagctacttgggaggctgaggcaagagaatggcgtgaacccggggggcggagcttgcagtgagccgagatcgcgccactgcactccagcctgggcaacagagtcagactccgtctcaaaaaacacacaaacaaacaaaacaacaacaacgacaaaaaatagggaacttgtgaatcattgacattgggatgtaataatttatatatacatttatgacttacttttaggatttttaaaattatgattttatcttgatttccaccttagtttacaaattttggaaaagctggtattgatttcttatatatatttattcaaatcatttctgaatttatgtttaaaatgttaaagcatactgaattgtataaaaacaaaataaaaagtgccttgaatccttctatcactacccagaatgatccactattaatatattggtctactttcttcttgtcttttttctattcaggtatattagtgcgtatataaatatacacactaacatacttaaaaggtgtatctatttatacctaaaacaaatttgtaatattctgaataagtagttttaaatgatgctttgtcacctaacaattgtcattgggtatttctcataaacatgaatttaaagcatccagagaataagaacgtatggaggccccatattttattttaccaccccatgctgttgggcattctagttgtttcccattgtttgttatttactataatattataatgaatatttttgaatataaaatttctatttccctttgaaataattaatgggtcaaagggcatgaatggctatttaaaaaatacatttgatgcatattttaaatgtacctctggaaggagtctatcagtttctctcttcacagtgtttctctcttcatagtttctctcttcatagcatcatttcattgtattctcatggataccgggtaatatgatgctatgaacaacttggccagttttctgggcaaagctgtcatggtttttaaaattgtttttatctttttatcttcgattgctacattattacctccataagaaatattctttttccttcccctttttaagtcttaaaaaataatcacaatacttgcctcataaaaaaattgggaaacacaaatgtgcataaaatgctaagtacctattaggaattattgtttttaagccattatggtgacaatgaaaaatcttcagaaatgataatcagttgcaaagaacataccctatgctttgatatcctaatcttagacagatgctcctggtgcccacgttgcctttattcagctctcttctgattttaaccacagtgtggtagacagttcgtgaaagctcatattcttctcttcctgccaggatgttgctggaagctcttgcagctgtctcttacattcttccccagggtctttttcaacagagatctcgcagctggcttgaattttgctgtctaaaggtgcagggatggggagggattaatgcctagaggacatccttcaaccaatgggagatgggaggtagtgaaaaaatattccaatttcctatatttctggtagacaattctgggaggcattccatgtatgcttctcagagcttctggcagagtcccactcttgttgcttacagcagaaacctcagtaaagcaccatataatgtcttttctctctttgtgtctgactctcctcccttatttctgtttcctaggagcagtttggaaataaactaactgcaaccaagtctttgttctaggctcttctccgagggaaaccctaactacgatatcgtccctttccctttttctccaacaatgcagagttctttccccttcccttggagaacactcagttaattaactcagccattgcatattgagggtcaatcctatgccaggcactgctttgtggaggatgcgaagacagactcagattctggccatcttggagctatattctagtggagcaggcagaaaatgagcacaataagtaagcaagatgttagacttcagaagtgctaaggggaagaaaggaagaaaggtaggaaatgtctggggaaagaggtgcattgcaattttagataggatggccaggagaggctttattgagaaggtctcttttgcgtaaatatctgaagaaggtgagccacatcaagatatgtcggaaaaatattccatctgaggaaatggcaaatgcctgagccctaaggtaggagtacttctggaacacttaggaatattgagaagaccagtgtggatgaagggaggtgaaggagaatgaggtgctattgccagagaggaagcaaggtgatagacagatcacataggaaccttaaggtctttggtatttaccttaagttttaaaatttatttatttatttatactttatgcaaatcaaaagtgacagggaagcaatgactttatctattggagtcttaaaattgatatataatagttgtacaggcctggagcagtggcttacgtctgtaattctgcactttgggaggccaaggcaggcggatccccaggtcaagagatcgagaccatcctggccaacatggtgaaaccccgtctctactaaaaatacaaaaattagctgggcatggtggcacacgcctgtagtaccagctactcgggcggctgaggcaggagaatcgcttgaacctaggtggcggaggttgcagggagccgagattgtgccactgcacttcagtctagcaacagagcgagactccgtctaaaaaaaaaaaagttgtacatatttttggggtacatgtgatgttttgatacctgtgtaatgatcaaattagggtaattggatgtccatcacttcaaacatttatcttttattgggaacattaccattcttttcttctagctattttgaaatatacaataaattattgttagctataatttccctattgtgctatcaaatactgtaaattattccttctatctaactatatattttaagtttgatggagaattactgaagaatattgaacagaataatctcaaggtcaaaaggattattctggctgctataatagtcttcaggagaacaagggtggaaggagaagccagttatgaattatcgcaataatccaggagagagattatggtgatttgaacctgagtcttagcagtggaggtggtgagaagcattgagttctatatattctgaagctggagttgacagaatttgctgatggatggggtggagagagtgagagaggtaaggaggcatagacaattccaatgtgtttgggctgagagactaaaataattatgtttgccatttactaagttgaggaagcaagcaagaagagaagattggaggggtgtatgggagctcaattttccacatattaaacatattccctatttattactttccaggaggaatgtcaaggaaaataggtgattgcatatatgaatctggatttaagaaacaaggtcagggctagatatgtaaattagagagtcactagtatgtagatgatattttgaaaccttggaactggatgagatttgcaagggagtatgtataatagagaaaagaagaaactcaaggttgatatattaattttctagagctgtcataacaaaataccacagactggatggctgaaacaacagaaattaattttcttgcagttctgatggctgaaagtccaagtcaaggtgccagcaggggtgatttatttggaggcctctctccttggcttgcagatggctgctttctcagtgtgttttcacatgctctttcctctgtgtgtgcatatccctggtgtcttcatcatcctataaggacaccagtcatattggattagggcctctcccttattccctcatttaaccttcatattacccctttagaggctctattcccaatacggtcatattctaacatactgggggatagggtgtcaacatacacatttttagggggaacacaattcagtctataacacgtggatatcttggacattctgaaattagaatggaggggagataagaaaaaataatcaaataagactgagatggagaggacagagaggtttagagaaaaaattggagatatatgaaataaagaaagtactttgaaaaagaaaaaggaaacaattgtgtcagaggttgctgctatgtcaagtaagataaagactaaggattgaatattgaatttagaaatgtggaggtcacagttaccttgataagattagtgagtggtagagtgctgggggtgagcgtctaactggagtggattcaggattaaataaagaaagaaaagccagaagcaagaaataaagacagctctttcaaggagtttttaaaaaccaattgcctaagaacttcatgttgtagtctttaatttcagccttattaatggagaggggcaagattggtgaattcattgacatgcaggaacatggagtaagcttcacaaaattaggtaaaacttggacttcccactctaagatggtgtggcgggtagaatagcggtcttctgaaaatgtccatgccctaatctccagaaccttggataatctttgctaagccttatactcttaacagagaaatacagagacttaagatggttaaaatgaactctctctacgggaaacatccaacagagacatgttactgccctgagctctctagagggactctttctccttaactttgcttaagcctgccaagttagctttctttttgattctgtgaactaaacagaatctttccaacaaagtcttttgtttacctaagtcggccagagttgcttataaggaaagagacctaagtgacacactgttccttccatttggaatgcctcacacaacccaatttcatttcagtttcacttgctgtgtcccatctattttactttctggacttgatagtgtgatggttaatattaggttgtccacttgactggattgagagatgcctagatggctggtaaagtattgtttctgggtgtgtctgtgagggtgttgccagagagattgacatctgagttggcgaactgggagaggaagatccacccttaatgtgagtgggcaccgtccaattggctgtcagtgcagctagaacaaagcaggtggaagaagggggaacaagctcccttgctgagtcttctatttttcttcccataccagacacttgctcccacacctgcccttaaacatcagactcctggtttttcagcttttggctgggactgaaggctgcactgtcagcttccctggttttgaggccttcagacttggactgagccactactagcttttttctttccccagctcatggacagcctatcatgggactttgccatgtcgtcatataagccaattcttcctagtaaactcccttttatatatacaaatattctattggttctgtcgttctggagaactccaatacagatggggttgtctactttacctttttcctggagtcttttctttactgattgactggatggcaagtaaaaaatagctctaatttgtgcaggtgcagtggctcaggccagtaatcccagcattttgggaggtcaaagcaggatgattgctggcatccagaagtgtgagaccaacctgggcaacagagcaagaccctgacactacaaaaaaaaaaaaaaattagtcaggcatggtggcatttgcctgcagtctcagctacttgggaggctgaggtagcaggatctcttgagcccagaagttgaggctgcaatgagctgtgattgctccactgcactcagcctgggtgacagagtgagaccctgtctcaaaaaaagaaaatcgctcaaatgtactacagtgaacttccactgttagaactacagttggatttttctctcctaatacctattccagccccgtgtggtagggaaccaggaaaccaaattcatatatcctgctctctgctgatacagatagctatcaaaaggccgtaagttgaacaaaatgccttagcaaaatgagagcagtgttaaattgttctgttttagagtggtgtgtatatcagaagttgattatcacaataattctccttaataaacaacaaacctcagtggttgataacaataagcatctatttagcttatgagtcgacgggattcagctgatcaggcctgggtttgactcttctcatgtgtttactgtcagctgtaggttcagtaggtgactctgctgtccttgggtgggccctctcacaaatctaggtggcatctaaggtggccttggcggagatgactggggcaactcagttctgatccttgaatctctcatctttctcctgggacgagaggggcagcttggtcaagttcttatggcagtagcagagggtaagagcaagcaagctccaccatgcaaatgtctcaggtctctgcttgtgccacacttgtcagttgtctccttggggcaactcaggtcattctagctccagagctcccaaccagttggccaagactcactggacctgcaacagagctcacctattccctctgcccaattttgcttctccgaaagcaagtcctatggctgagtgcggaatgagagagcaccattgagctatacgcacgtggtatagagacaaggaagactgacaaactgggaccattattacctttgatctatcacagggtaacttttcttatttctttttcttctgtatttgtgttttatgatctttctacaacaaatacctgtagcttggttcataaagaaaagcttccaggcaagagcagattgaaataatcaaaaacttaggaaaaactgcatagtatacacacttggctatcacattggctaaagtacttagtaatctattgaaatttaccaaagcagctgacttgatgaatacttgggttattctcaaacttggttaagtaccccctttcctttttctattcactgtggctagagctgataaatgaatgctgaaatgtatattgctcttatagacttgaatgtactagcagcattcttgctgggattaagtgttgcatgctgtcctgacagaaacgaaactcaatgacttgtctatttctgtaagctgaatacagtgagtttggaatgttgtacaactctaagactgtgcaccaaaatgctcaggactggtgtgttccccgttgcaaaaagcttacattcaggtgaaggagaaagcaaaataaataaataaataattaattagatagctacaaatggtggtaactttgtgaaataaattaacaagagagtaagacagagaatgataggggaaggtacctcttttagatgggtgatgtggaaagacctctctggtgatgtagctcctttattttcttatttttgcataaaatttttagagtgtgaggcatcatcatgatttcagagacatgaggcatgtaacttgggacaaatacatgactgtatttggttgaagatgtttgtcatttttgcattgtgccctatggctaaaatgttctgattttgatcatgaaacaaaattcaccacagttatggttcaattgtcaaggaagaaagaaatactacatcaccagagaggtctttccacatcacccatctaaaagaggtaccctcctctatcattctctatcttactctcttgttaatttctttcacaaagttaccacgatttgtagctatttaattaattaattatttatttattttgctttctccttcacccgaacgtaagcttcttgcagcggggaacacactagtcctgttgatagtgacactcctagagtccagcacagtgcctgtttattatatgaatgaagatgcaccgtcattgaaatattacacttaggaaccatatgtattaattacccaattcacctatttaaaaaactcaatggttataaaagtaacaacacagtttttttcctgctaaaaatagacacttgcatgtctgctagaggctccgtttaaaaatactttcaatctacacttggttaattataaataatattcactctttagtagtggtgggggttgtatgatcagaatcagaagtgcaggtgattctaatacatttatgaagaaataactctctgggattcatggtaattgatgtactggcacggtaaactttccaaggaatgttgattctgaagaaaatctgcagctggcgcagtggctcacgcctgtaatcccagcgacttgggaggttgaggcgggaggattgcttgagcccaggagttcaagatcagcctgggcagtataacaagatgcccatctctttaaaaaattaaaaaattagctgagcatgttggtgtgtgcctgtagtcccagccactcaggaggctgagtgagaagatagcttgaggcccaggaatttgaggctgcagtgagctatgattgtaccactgcactccagcctgggtgacagaggaagactctgtcttaaaaagtaaaggaaggaaaatctgtaactcacaatctattcaataaggtactgttccgttgtttgtattgattatatgggcagacttaagagaatgtgtttgtgtgcaggcagtgaggtagtgtttgcatgtgtttgtgtgggtgtggttaagattatgtgaaaacagatgaaaaggttacaataagaaaacattagaaaatccactgattcttttttcttttttttctttatatactttaaattctagggtacatgtgcacaacgtgcagttttgttacatatgtatatatgtgccatgttggttcgctgcacccattaacttgtcatttacattaggtatttctcctaatgctatccctcccccatccccccaccccatgacaggccctggtgtgtgatgttccccaccctgtgtccaagtgttctcattgtttaatttccacctatgagtgagaacatgtggtgtttggttttctgtccttgggatagtttgctgagaatgatggtttccagcttcatccatgtccccacaaaggacatgaactcatccttttttatggctgcataatattccatggtgtatatgtgccacattttcttaatccagtctatcattgatggacatttgggttggttccaagtctttgctactgtgaatagtgccacaataatcatatgtgtgcatgtgtctttatagtagcatgatttataatcctctgggtatacacccagtaatgggatcactgtgtcaaatggtatttctagttctagatccttgaggaattgtcacactgtcttccacaatggttgaactagtttacagtcccaccaacagtgtaaaagtgttcctatttctccacatcctctctagcacctgctgtttcctgactttttaatgatcgccattctagctggtgtgagatgctatctcattgtggttttgattttcatttctctgatgaccagtgatgatgagcattttttcatgtgtctgttggctgcacaaatgtcttcttttgaaaagtgtctgttcatatcctttgtccacattttgaaggggttgtttgactttttcttgtaaatttgtttaagttctttgtagattctggatagtagccctttgtcagatgggtagattgcaaaaattttctcccattctgtaggtctcctgttcactctgatggtagtttcttttgctgtgcagaagctctttagtttaattagatccgatttatcaattttggcttttgctgccattgcttttggtgttttagtcatgaagtccttgcccatgcctatgtcctggactcattttttttttttctcaaggaacaaaaaagaacagtcaaaagcaccttgtcattgtttaaagctaatttgttttaagctatggtgtctcttattcaagagtgagaagtttcaagaagcaatttagataatattttttcttagtcttaattttgatctaaagttttctgatcaacagtacccaaataatattcaatgctgggtagtgacccaaagatttctcacagaaagcctggacagttagcaccttggataacccgaggctgttgttctgttccacatttcctccttgaatttccacattgaggagcacaacagaaatttattttctcacagttctggaggctggaaatctgagatcaaagtgtctgtaggttgagggccatagaggaaggatctgtccctggcttctctcgttgacttgtaaatgcccttttccctgtgtgtcctcatatcgtctttcttctgtatatttctgtgttcaaatttccccttcttgtaagaatatgagttgtattggattaggtcccacctaatggcctcattttggcttacatacttctttaaagaccctgtctccaatatggttacattctcaggtactagggattaagacttcaacatatgaattttgggggtctcacaattcagcccataacaacctgtcttcatcagagtctgtttgccctcaggagccaattctaaatacagtgataaaataaggttcatgacctctttagcaggagggagtggcctaagttagtcagtctgggttgagactccaagacccacatatccacagagatgggatcttctccaagcccttttgaattttctaaatcttgacatctgttccttctcatcggtttctgaacgcatgttccagcttccatatattgtagtctatctgggtggtgactaggtagtttgcttagctgttaaaaaacctctctctccttgggtagatgctttcatctagggttgaacatcagaatcattatagaggtgcttcagaaaaaaagacaaagaaaagatgtacttttattcaaccaagtaaacaaacaaacaactttacaaatgagattctgacacaaattctaattaaagaccaatacctcccctactaccaaatgttgcctgagatcttacaccaaaaagagtgactagcattgtcacttatgtgttaatgagcagcaccaccttcaagaagttgctactggagtcaccacttagatggcaattaaatattaacaacaattaaagttgagactagcttcaccacctccctatgcaattaaataataatgactgttaactacatgccaatcataactctacaaggtagatattattattattttatattatatttttgagacagagtctcactctgtcaccaggctggagtgcagtggtgcaatctcggctcactgcaacctctgcctcccgggttcaagcaattctcttgcttcagcctcctgagtagctgggagtataggcccgtgccgccacacctggctaaatttttattttcagtagagatggggtttcaccatgttggccaggctggtcttgaaaccctgacctcaggtgatccaccagccttggcctcccaaagtgctaggattacaggcgtgagccaccatgcctggccggtagatattatttttaatccctgtttttcagataagaaaaataagtcttaggatgtctgtcttagtctgttcaggctgctgtaacaaaataccataagtggggtaatttataaataaaagaaatatattgctcacagttctgtagtctaggaaattcaagatcaagtcatcagcagattcagtgtctggtgaggaattttgctctgcatcatagatggcaccttcttgctgtgtcctcacgtggcagaaggggcaaacaagttttctcagggttcttctctaagggcactaatccaattcatgaagggtttgccctcatgatccaatcacctcctaaaagtcccacctcttagtactatggtgctgaggattagtgttcaacatgtgaatttttggaggaaggaaatattcagaccatagcaatgtctaagtagattatttaagtcacataactagtaaatagttcacatagtgtttgaatttggatgtgcctaaaatttaagcacaaccttcaccaccttgctatactgctagctgttttcctctagcttgtgtctatagccaagtggttagtcctaacctagctaggctaatttctgacatccagccccaccttgccagaccatttggaatcagcatgtcttgaggaaaacgcctccatgatatgacacagctactgactcctgtaaaaagtctagccctcagcttctgctgttcttttgtgttcttgtgtctggcttgctacattttgtcctactgcctatgctttgcattttaaagactgtcttctaaaacacctacaaaattttcaggaggactaaaattttcatttccaaaatactcaatgagtattttatattataatttaaaatgctttcaatagtcagctcttaggaaaatctggctcttagtgcagaaatggaggatgtagcagacatctgttcaattacagtattgataatagaaaagcttttaaaaatctacacctcataatatgttaatgcagggaaatacttcttagcagtttttatagaatcttgtcttttgcacaataaaaggcaattctccatttcaatgcagatattgagtaaatgaaaattgcctttttaaatttgagaggacagaagaataaagatatttggcttgagataattgcttacactgttggtgaaagctaaagttgtttcttataatgcaataatgactgcattttaaataacacagatgagtttcactctatgcatagataaatagttgtatggaaatcaaattttcataaatgaaattacactttaaaaacacaatactcataagttacttataatttttgtagcaaaatttttttgtaaaaataattgctcagtattcactatataacttcagctatttaattatggtaagaaatttttttaaaaggaggcagagcatgatggctgaatagaagcctccactgatagtcttccctgtaagaacaccaaattgaataaccatccacacaaaaaagcttcttcatgagaaccaagagtcaagtgagcaatcacagcacctggttttaacttcatatcactggaagaggcactgaagaggatggcaaagatagtcttgacttgctgatgccatgtcttctccatcctctggcagagaggcatctgtgcacttgaagtggcgctgagagagcatctgtgcacttgaagggagagagagtgtagtgattctgggacatttaattggaactcagtgctgacctatcacagtggaaagcaaccctgggcagaactcagtcagtgctgatggagggagcatttagaccaaccctagccagagggtaatcacccttcccaatggtcagaacctgagttctggcttctggcaagccttgccactgtgggctaaagtgctctggggttctaaataaacttgaaagtcagcctagaccacaaggactgcaattcctgggcaagtcatagtgctgtgctggactcggagccagtggacttgggaaagcatgtgaaatgccgggtcagcctagggactccttgtaccacccttaccccaaccctagacagcacagctcacacctctaggagagactccttccttccacttgaaaagaggaaaagagtaaagaggactttgacttgcaacgtatataccagctcagccacagtaggatagggtaccaggcagagtcttgaggcttctattataggctctagctcctggatgacacttctagacacaccccgagccagagggaaggatctagtcctggcaggattcatcatctgctgactaaagagttcttgggccctgagtagtcagcagtggtaggcaggcagtacttgcatgcgccttgggtgaaactcagagatgtattggcttcaggtgtgacgcagcacattcccagctgtggtggctatggggagagactcctgcttgagaaaaggagaaggaagagtaaaggggactttgttttgcagcttaagtaccagctcagccacagtggggtagagcaccaaggaggctcttggggtctccaatttcaggccttggttcttagatggcatttctggacttcacctggatcagagggaagctcacagccctgaggagagagtcccaggcctggcagcacaagctgattgaagagcctttgggccttgagtgactattggtgatagccaggcagtactgactgctggcctggggtagtggtggccattgagagactcctctgcttgtggaagggggaaagaagagagggaaggacttggtcttgcggcttgagtgccagcttagccacagtagaagagggcaccaggtagatttctaagatttctgactcgaggctttggatcctggatggcatctctggaccctctcagggccagtgggaccttgctcccctgaagggaaggacacagcctggctagttttggcaactgctgattgtaaagccctaaggtcttgagtgaatataggtggtagtcaggcagtaggtactgtaagccttgtgcaagacccagtaccaggctggcttcaggtctgacacagtgctgttccagttgtggtggccacaggggcttgtgtcaactctcccctagctctgggaagctcaggacagagtgagagagactatttgattgagagaaagtaagagaagacaacaagagtctttacttggtaatcagaattcttctggatcttgttgaagataaggtggtatctctgcaagagccaccgtgttacttgagtaaggatgccccctaatgcaaatatggctgcagtgaccaaaaccttagattataacacctaagtctcttggaatatccagaaagccttcccaagaaggatgggtacaaacaagcgcagactgtgaagattacaataaataccaaagtctccaatgcccagacatcaatgaacattcacaagcattaagaccatccaggaaaatatgacctcaccaaaatcaaccaaataaggcagcaatgaccaataatggcagagatatatgacctttcagacagaattcaaaaatagttgttttaagaaaacgcaacaaaattcaaaataacacagagaaggaattcagaatcctatcagatacatttagcaaagagattaaaataattaaaaagaatcaagtagaaattcgcaattgaaggccggacacagtggctcacacctgtaatcccagcactttcggaggctgaggtgggtggatcacttgtggtcaggagatcgagactagcttggccaacatggttaaaccccaccactaccaaaaatacaaaaattagctgcgtgtggtggtgcatgtctgtaatcccagctacttgggaggctgaggcatgagaattgcttgaacctgggaggcagaggttgcagtgaaccaagatcacaccaatgaactccaacctgggggacagagtgagactttgtctcaaaaacaaaacaaaacaaaaaaaagcaatttgcaattgacatgctgaagaatccatcagagtctctcagcagattttttttttttttgttaaatttttaatttttgtgagcatttagtaggtgcatatatttatgggacacatgagatattttgacggggcactcagtgtgtaataatcacagggtaaaggggcatccatcatttccggcatttatcctttgtgtcacaaacaattttatttatttatttatttatttatttatttatttatttatttaagatggagtcttgctctgtcgcccaggctggagtgcaatggtgcgatctccactcgctgcaagttctgcctcctgggttcatgccattctcctgcctcagcctcccaagtaactgggagtgcaggcacctgcaacaatgaccggctaatttttgtggtttttttttttttttttttttttagtagagacggggtttcaccgtgttagccaggatggtctcgatctcctgatcttctcgtgatccacctgcctcggcctcccaaagtgctgggattacaggtgtgagccaccacattcggacttctttagttatttttaaatatacaatacattactatgggtgtagtcaccctgttgtgctatcaaaattgtaaatcttagtatcaaatactatatcttattcattctatctgattatatttttgtatgccttaagcatgctcacttcccgccactccccactatccttcccagtctctgttaaccatgattctacactctatcttcatgagttgaattgtattcatttttaactcccacaaataactgagaacatttatcagcagaattgattaagcagaagaaagaattagtgagcttaaagacaggctacttgaaaatacacagtcagaggagacaaaaaaaaaaaagaataaaaaagatgaagcatttctacaatagctagacaatatcttcaaaagggcaaatctaagagttatttctcttaaataaaaggtaaagagagatagagtagaaagtttactcaaagggttaatatcagagaatgtcccaaacctagagaatgatataaatattcaagtacgggaaggttatacaactcgaagtagattgaacccaaataagactacctcaagatatttaatgatcatacccttgaaagtcaaggataaagaaaggatcctaaaagcggcaagagaaaagaaacaggctgggcatggtggctcacacctgtaatcctagcattttgggaggccaaggtgggtggatcacttgaggtcagaagtttgagaccagcgtggccaacatggtgaaaccctatctctactaaaaatacaaaaattagctgggcgtggtggcacattgcctgtaatcccagctacttgggaggctgaggcaggaaaattgcttgaacccaggaggcagaggttgcagtgagccaagagcatgccactgcactccagtctgggcaacagagtgagactccatctcaaaaaaaaaaaaagaaagaaaagaaagaaaagaaacaaataacatacaatgaagtaccaatacatctgatagcagacttttcaggggaaaccttgcaggccaggagacagtcgaatgacatatttaaagtgatgaaggaaagaaaacttgtacgctggaataatatatccagtgaaaagatccttcaaacatgaagcagaaataaagactttcccagacaaacaaaatatgagagactttatcaccaccagaactgtcttacaaaaaatgctaaaggagttttttaatctgaaagggagattaatgagccataataaatcatctgaaggtacaaaactcactggtaagtacatagaaaaacacagaatagtataacatattgtgcatagactactcacatcttaagtggaaaaatatgagtgtgcatatgagtacataaactaatcatatcttaagtagaaagaccaaaagatgaaccaataaaaaataataactacaacaactcttcaagacatagacagtacaataagatataaataaaaacaacaaaaaattaaaaagtggagggacaaagttaaagtgtagagtttttatgagttttctctttgcttgtttgttagtttgtttatacagtcagtgttattaaaataaagggctataagacattatttgcaagtctcatgataccctcagatgaaaaatatatagcaaatcacaaaatataaaagcaagaaattaaaacataccaccagagaaaatcaccttcactagtatgaagataggaaggaagaaagaaggaagagaagaccactaaacaaccagaaaacaaagaacaaaatggcaggcataagtccttacttatcaataataacattgaatgaaaatcaactaacccctccagtcaaaagagttagagtggctgaatggatgaaaaaataagacttaacaatctgttgcttacaagaggaatacttcacctataaagatgcagataaacttaaagattttctgtgcaaatgtaaaccaaaaaataaggaggaatagctatgcttatattagacaaaatagattttaagacaaaaactataaaaagagatgaagaaagtcattatatatgataaaggggtcagttcagcaagaggatataacaatttgaaatatatctacactcaacactagagcactcagatatataaagcaaatttcattagtgctaaaggaagagctagatcccaatacaacaatagctggagatttcaacactcaatattcagcactggacaaatctttcaaacaaaaaagtcaacaaagaaacattgcacctaatctgaattatagaccaaatggacctaatcgatatttacagaatattttcttccaacaaatgcagagtacacattcttctcagcatatcgatcattctcaagaatacaccgtatgctggatcacaaaacaagtcttaaaacttcaaaaattgaaattatatgaagtgtcttctctgaccacaatggaataaaactggaaatcaacaacaagaggaatttttggaaactatacaaacacatggaaattaaacaataagctcctgaatgacgagtggatcaatgaaaagattaagacagaaatttaaaaatgtattgaaacaaatgataaagaaaacacaaaatatcacaatctatgggatacagtgaaagcagtatgatgtggaaggtttatagctataagtgcctatattaaaaaagtagaaacactttaaataagcaatctaacaatgcatcttaaagaactagaaaagcgaaagcaaatcaaaaccaaagttaatagaagaaaaaaataaagatcagagtagaaataaatgaaactgaaatgaagaaaaaaatacaaaagatcaacaaaacagaaaatggttttttgaaaagataaaattgaaaaacctttaaccagacaaagaaaaaaaaagagaagaccaaaataaataaaatcagagatgatgaaagagacattacaaccaacatcacagaaattcaaaggattattagaggttactatgagcaagcatatgccaataaattggaaaacctagaagaaatagatgaattcccagatattacaacttattacaattgatctgtgaagatattcaaaacctgagcagaccaatatgtaatgagattgaatctataatgaaaaaatttgtcagcaaagaccagaatccagtggctttattattgaattttatccaacatttaaagaactaatacccatgctactcaaactattccaaaaaatagaggtggaggtattacttccaaactcattctatgaggctggtattccctgataccaaaaccaaacaaagacacatcaaaaaaagaaaactacaggccagtatccctaatgaacaatgatacaaaaatcaaacactagcaaacaaaattcaacaacacattaaaaagaccattcatcatgaccaattggtatatattccaggaatgcaggggtgtttctacatacataaattaatcaatgtaatataccatatcaacagaatgaaagacaaaaaccatatgatcatttcaactgatgctgataaagcattagataaaattcagcatcctttcatgaaaaaatcctaaaagaactgggtatagaaagaacatacctccactcaatagtagtcatatatgacagacccacagctagtatcatactgaatggggaaaatctgaaagtctttcctctaagatctggaacatgacaagaatgcccactttcatcactgttattcaacatagttctggaagtcctagctagagcaatcaaaaaagagaaagaaataaagggcatccaaattggaaaagaagaagtcaaattatccttgtttgcagatgatattttcttatatttggaaaaatctaaagacaccaccaaataactattagaactgatagacacattcagtaaagttgcaggatacaaaatcaacatacaaacatcagtaggatttccatatgccaacagcgaacgatttgaaaagaaattgagacagtaatcctatttaaaatagctgcaaataaaattaaatacttaggaactaagttaaccaaaaaagtgaaagatctctgcaatgaaaatataaaacgctgatgaaagaagttgaagaggcacaaaatattggaaagatattccatgttcatggattggaagaatcaatattgctaaaaggtacatactacccaaagcaatctatatattcaatgcaatccctacaaaatacatatgacactcttcacagaaatagaaaaaataatctaaagtttatatggaaccacaaaagacccagaatagccacagttatcctgaacaaaaagaacaaaactagaggaatcacattacttgacttcaaattactacaggtatcgtaacaaaaatggcatgatactggcataaaaacagacatttagaccaatggaacagaacagatattccaggaacaaatctacgcatttacagtgaatttgttttcaacgaaggtgccaagaacctacactggggaaaggacagtctctttaaaaaatggtgctgggaaaactgaatatccatatgcagaagaataaaactagactcctatgtcttgccatacagaaaaattaaatcaaaatggattaaagagttaaatctaagtcctctaattataaaactactgcgagaaaacactgaggaaactctccaggactttggatctggcaaggatttcttgagtaataccacacaagcccaggcaaccaaagcaaaaatggacaaatgggatcacatcaagttaaaaatcttctgcacagcaaaggaaacactcatcaaagtgaaaagacaatgcacagaatgggagaaaatatttgcaagctatttatctgacaagggattaataaccagtatatataaggagctcaaacaactctataggaaaaaatataataaatcaatcaaaaaatgggcaaaagatcagaatagacatttctcaaaagaggacatacaaaatggcaaacaagcatatgaaaaggtactcaacatcactgattatcaaagaaatgcaaatcaaaatttcatgagatatcagcccagttaaaatgttttttatctaaaacacaataacaaatcctggtgaggatgtggagaaaggggatctttgtacactgtttgtgggaatgtaaattagtacagtcactatgaagaacagcttggagtttccttaaaaaactaaaaatagagctaccacaagatctagcaatcacactgttaggtatatgtccagaagaaaggaaagagatctctgcattcctatgttgttgttgtttttttaaatttatttccaactttcattttagattcagtgggtacaggtgcacatttagtacaggggtatattttgtgttgtaggggtttggcgtccagatttttttgtcactcaggtaataactatagaagtcaataggcaatttttcaatcctcagcctcctcccaccctccctgctcaagtaggccctggtgtctattgttcccttcttttgtgttcatgtgtactcattgtttagcttccacttagaagtgagaatatgctatatttagttttccattcctgggttaattgactaaggataatggttttcggctctgtcagtgttgctgcaaaagacatgatttcattcctttttatggccaggtggtattccttaaggtataggtaccacattttctttatccaatccactgttgatgggcatttaggttgattccatgtctttgctattgcaaatagtgctaccatgaacatacatgtgcatttatccttatgatagaaaaatttatatttctctgggtatgtacccagtaatgggactgctgagttgaatagtagttctgttttaagttatttgagaaatctccaaaatgcttttcacagtggctaaactaatttacattcccacccccagtgtataagcattcccttttcatttcaaccttgccagcatctgttattttttgactttttaggaatagccattctgagtggtgtgagatagtatctcattgttgttttgaattgtatttgtctaatgattaatgatgccaagcattttttcacatgtttgttggctgagtgtatgacttcttttgagaagtgtctgtttgtgtcttttgcccatttttaaatagggttgtttgactacagtcaataataatttgttgtacttttaaaaatacgtaagagtataagaataattggattctttgcaacacaaagaaagggtaagtgcttgaggtggtggatacaccattttccctgatgggattattatgcattgtgtgcctgtatcaaaatatctcatgtacctcatcaatattcacatctactatataccccccaaaatttaaaaaagaaacacatacaatatacatataaagtacacatatatatcttatataactttgggagaaaaataatacttaaaaataatgtttctaaaaattttaaatttctaaaattgtaaatataaatgtttgatatttgaaaaataaaggtattgaattacatgaactaataatatatcattatgactcgaagtgggcaaaggctagcaaccataaaaggagaaaatagaaaacagcttgttaactttagttaaggacaattttatacttttattcaaacaatcctatgtagggttcaatgtctttcttaggaagttttggttgaacagttttgtcctctatactgtgctatcatattccataaagtatttctgttgaaagaattttcaactctttactgagtcaaaagttgaatgtcatactctctttctttaaaattgatccaaaccagttctctgtcatgaattaagattaaaactttcaacgctctatcctatcttttggttaaataaatgaatgggtgatgaataaatatagggtggttgccatggcaaatctttaaaaaaattatctaattatcaaagtcaaatcagatttttaaaagtaaaaaggtcttttacatctgtaagacacaaagtacatgtatattgttattgttcttaactagctagagattagatattacattatctcaaatttattgtaataaataaatggagagttgcattcattttaatttacaaacattttagtgggttcaatggtggtcccccccaaaagatgtgtccatatcataacaccaaggatctatgaatgtgaacttatttgaaaaaagggtctttacagaaataattgagcctctaactgagaacatcctggattttctgggtggctcctcagtccaatgacgagttccttatagcagaagtagagacccagagatccagaagagaaagctatgtgatgacagaggcagagcttggagtcatgcagccacaagccaaagaccacttggagccacctgaaactgcaagaggcaaggaagagctcttttctagagggagtgcagccctgggcgtattgccctagtagcaccttgattttggacttctggtctctaaaattgtgacagaataaatttctgttgctttcaggtactaagtttttggtaataagttgcagcagccttcggaaactaatacatatatcaaataggcggaggaccagtatgccaaagaaaggaaatgatttgttggctcttcatgctgagtagggaggaagaaaacaagctatccagtatgttcatctccactgctctcctctaaaaggagataagtctctaccagtctctactatcaagatataaaatctttaattgttaattttttattgagatataacatctatcatataaagtaccaaaatctcaggtgatactttttgcatatatatttatgtattaatatgttcaagtttctacacacacatacaattgtgtaacagtaaccaccactcagatggacacagaacatttccagcataaaagaaagttccctagagtccatatcctgtcaaaacctacctatccacaatagcctctgaaaacaaatacttcgattttaatacaaaaattagccaggtgtaatgatgcatgcccctagtcccagctacttgggagactgaggtgggaggattgcttgagcccaggaggtagaggctacagtgagctgtgatcacatcactgcactccagcctaggtgacacagtatttgtgacagggtcacctgtctcaaaaacaaaacaaaacaaaacaaaaactcattctattattagcagaaatgggatcatacagtttgtatttctttgtgtcattatttgtccgtaatgtgttatttgtctgtatatgctcattattatgtctgtaaaaatcatccatgttaattgtattaatcaataggtctttttctgtttaattagggaggtgaatattccacaaaatatttactcttctcttaacaaacagttgggttgtttctagttttaagcaattgtaagaaaattgctaagaatattctggtcttatatcttagtggacatatgtgtttatttttcttgggtatatatgtaagagtgaaattatttggccatagggtaggcatatatttagtttttatagtactattaagaactgttccaaaattattgtatcaattcacacttccatcaacatggtatgagagttccagttgctccacattcttgctgacacttacaattgtttgccatttaaattttagccactggtgggtgtttagtggtatcttattttgtgttttaatttgcacttccttattgaataattatgttgcgcatcttcccttatgcttgggctattttaataacctcttttatcaaattcctgtttgagccttttgcccatgaaacaattttttttgtcctttatattattgaaaattcctttctgctttagtgaatcaaggacataaatagtcagtctttcatgggtagaatttaatttttctgtgcattggtctattcccagagagctttaaatcttgcttaattgtgctcacctttttatacatcatggattttgactctggttctttcgtttttccatttcattttagtcaccaaaatgcttaaaactagagatcaactttcttagctgcaaaagcttctagcctttcaagaagttcatactttatgaaattgcacattaagcatttatttttcagaccatttttgaacattactcctaaattaataaagtattctgatactgctttagtattgattacagtaaaaagggtttgaaatatagctgttctttatgcataaaatacccagctaggaccagtactgccagagaaaaacatcgtattgaatggccatttccctacctaaaagatgtctcaatctgaatttatttggctacactaaagaatgcagtatatttagttttccatttgcataatgtgtttgtgctatagataatattttaaattgaaaagtttgttttaaattatttttacaatgaagactgttttcagctctttttatattgtgcatagtttttttatgtaatctactagcatgtgttttttgtagactgtttaatgactggatatcttcctccaatttttgaagtacaaaaccagtgtattttacttgtacactgttttaaaatctattaaaattgtcatttgacttttttctgttaaaatatactttctgaatacaaagctattattacattgtcggatatcagaatgcataatcctttggatgagtatataagttatacatttctgcagattgatcaattaaatattaatttatagtaatataataactgtaatattattatagtgatggtattgttaataatagtaattgatgagagaataaaagatttatatcttttattgttaaagttggacaccaaaaattaatgttagacagctgccctaccctgctccaactgctcagaatttccattcttcatccagtgggattttgtaaactccatagagactcttccatatttttttctacttttaagttgttgtttatttatttccttaacacatcatatatgttattagagaataaagcaatcgtaagtaattaagagaataaactgtttcttggttgttagaaatatcctggggccaagagactcatctcctatttaaaataatgtattgtgaacattcagtattgtgtattatagaaaaataaattcctgaggaataaataatttgcttttaatattaaaaagctttatcttcctaactaaaaaggttgatactaaaaagccagaacccagatttttccccttctagcttttttttagtgtttttttgttgttttaatggggagaaagagagaaattgcctaatactgattaaagcatatggccttatcttaggagcagtcccaaggttttgacaaaaaatataaaacattaaaaataggactttatgtgctacttttttgggcttggctggaggacaggacaaatacacagtggttttatgagcccccctggtgtataatatttatcttatttgctcttcatttatatttagtgcatgttgtaaaactgtgtaaggctatgaggtaactttagaagttataatgggcaacagctcttaatggagacttttcaaaaaatttttgtttacagattcactttgaagagtattaaagacacattcagctgaataaagcagactctatgtatcataggcttaattcatacatgtaataaaatctttccatgtgcttgcagaaataacacaaagatcaataaccggaaggaagccagagggatgaaaatgcatggtagatgaagattgttttgcacaagacaagagaaagaatatttaaagcttgctgacagattaatatggtctgctttacattttgtctgctatattacaaaatagttgcatctattctcagaattttaatcaaagccactgaaggagaaaagtgggcatttagaaaaatgaacctactgtttggctaaggatcttcagcaaagtagtacattctcaatagcatgttattgttcgttatttcacaaagacctcatcttcaagttttgttgggcaactagatgtgtagcctgtgaagttctgataaataatgatggtacatgatgataccaatttctttaattcttgcctttaaaagatgttgcaacataaaacaatacaataactggttcttgatatatttggcgtttaaaaaatacacacttagtggaaatcactctagacatttaaaagtaacgttgaccttatgaatatttgcatatgaaaagtgaaaaggatcatcttaagtgcagtagtgccccactgatagcatgagttaggacagttggtctggatggccttgtgagtatctcctgccttcatcacccctccacctgttcttcccaaagctttgcaagagatatcaagagacttgagaaaatatttgcaagacaaggcagaatctttggtcaaggacatggagattgggcaggctaagtttagcaactcaactttagtgatcaatggcaaataacaccaggcctctccatgttaagaagtgattgtgaatttgagatgccagagagctcatgcttggttaaaggagcaactattgctcaattccaatgtatgattttcaatcaatttccaagaatttccttgtgtttaggttctaaacagtctactgttaaaaccatgggtacacattggatgttatggtaatacaaaggaaatggttagacagtatacccatttatggaagttcctgtggtccacctacaaaacacaagttgacaatcacagtggctgctgtcgtcaatcctgggctgttgtgcgctgcagtattttcaccctggccattcaacacagttcatggacatcatgtctttccactgatacttttttaaagatagtttttatataaccaaatccttattccgtttacaatgaggtgctataaatgaattacctgaaattatatgtttgtctgttatctttcactatttctacttcacattaatttttagctataaaattgataaaccgatgcttagtaatatctctttccttcttttactctttggttttcaaattttatttcaatgccagagaatttcatttactaggaacaatgtattacaacacatttaaaaataaactacttaaatttggatgccaataataacaatacaactcaatggaacttgagttgttaaactcagccttcctgcagtttgataattgtatttcagagctacctcaccatgaattccttgcaaattttttccctgtagacaaaattaaaactgaattcaggaagttccagggggctttgtacttgttgttaataatgttattgctttattgatcaaccgtgtgggtagaataggcataatttttagcacacttaacctattgtcaaagtcaagatcctaaagccttccagcaacatcataaacttggttttaaaatatcccttttgaaaacattcattgaaagagcacctgctgagagtcaggtaacaggaagagttataaagatgtataatatgcattctccaccttcacagtctagtgaaggtgatggtggatacaatttaaatgcagtcagaaaataaaggtcatgtaatatagcatatttcatacattaataaatgattttatactttgaacaaactcatttcaatatttattttagtttctaactatgtaacaatttcaaacaactgagtattttctcttaacactgaaatttctaatgtcttatgtactgtcaatgtgaaattcataatactgactccacttatcccccgtgctggaatgcttatatattgaatagtgtttggatttgacaattacattggtaattgtcttgattccaaggaaagcatagaaacatttttaaaaatgtaagataaaaaaatttaggagataaatttaatcatttcttatgtttttacagtcattgtctttcactggctctgaagtgaatagcaacaaacatcctttactcctggtcttgatactagttctgactaggatggggaggaaattgggagttttttaaatagtttctctaggaagcagaatgtaattataacaggtactgtcctggcaatctttgtacttgagaaacctgtgaatacctgtgttgaagtagcccagatcatggggttggttttgtgccacccccatgtggctttgtgccactctgtctttggcactccagtgtcctgtagtgccagaaacccaatcctgaattcca

SEQ ID NO: 75 - DNA, 290077 bp, Homo sapiens
gctcctccaagaatgtatttatttacatgaaaacaccattttatacaaattgaagacacatcttaaaagaagggtttgtccaggcatgccttcctcatccccttatattgccacttccattttcatcttcttttgtatcataaatgaaacttcagactggttaaagaaaattgaatctgcctcttctccccacccaaaattacttcgattatttaatgtctgtagtcatccttcaaagaaaagtcttgcccggggttattttatttaatttatttatgtaatacagtgtagaaagcgatcatgtcataagcaatgattctgtacaatcatcctgcagaaaattgttttggagaattcttggtaattgaagaccagcagagcacccctccccacccgccccgtaaaagtgcttacaatgaacagggattcttttctttatcaaagacccaaagatacgtggacaaaaaaagaaaagcttgaagtctcaatgcctaatgtgtgcacataaaacaggcacgaagaaacaaacgtgtgtatcctcttaattcctatatcacaaatatagcagaagcagcaatctgtacagtaaaatgcagtcatggaaaaaaaatctctctaaagcatctgaaatacttaaaaatgtttaactttaaaatgcatagtgatcaggaaaggaatacttaggcaagagaagcagctgaactcccacgttcacatgaagcatcccccatcgattcttaaagcatatgtaaagtaggacttaattgggtcacaaaccacaagaataatatacaactggctaaggggctatgtgataaataatcaggagagaatctattcatgcactagtttgatacagctaaattctttacagtacacaaaacccattaataatgtagtatagagaccaaaatgtaaagagagatagaatacattactgatgtgtggattaattcaagttcaggcatctacttgtgttacagcacagctgtcaaaaggcgataatgagtaaatcataaaacgggtttgtttcttcccacattattctataaatggacaccgatgggtagtgaagcaatggttttgctgtccaacttcagaggctgctgtggcgggggtctagttctgcatctgctcaaagaacttgtaggttggattttcgtagccgttctgctgcatcttggacaggtggcgctcctctggggtgacagcggcgtcaacctgaaaaacaagaggagagctgagtaaaaaataaaaatcaatcttttaagggtgaacatggagaagcagtaaaaagataaggagtacagtactcttcttttgccaagattgcagaacacccataattttctcccccactttgacatcttggagcagaacgcctttgcccaccagttacacagatgctgtgctccatctagccaccaggtggcggtggaaaccttgacgcgcttgcaacgtgtccagtggttgtttctggttccccaactccacagtaagtggataaacccagtgcaatggtattttttcctcccctgttgggtccataaaggacaaacagagtcaacggaagcctgttttacgtggaagtgttttggtaaaatagataaaaccacaagagtatcatggagggagattcagcaaagtatactgtatcttgggtgacactcaaatctgtgtagaaaaatactcgatttcctggactgctgaatttagtctagcccatttctatcaaattttatgtttgttaaaatgttaaggagaggtttgagaatcaattaaaacaataacatataccaaagggggctattatttggcacaagaaaaaaggaagagcaaggacgacgccattctagatgatgtaattttttaaaaactgagaattaagatactatagaagtatgttcagctcaaagtttaaaatcagaccctctctgttaatatgttgctttacctctaaggtcaggccagtaactgaagacgtttttctccccctgtcactgttagagctgtgtgtggcatttactgtctgcaggttgggcagggtacttacccctacaacgtgggcagtggctgttcttgttttactatatttgttatacctctccccgttcgcagaagagaggaggtccttaactctgctgaatgagtatgttaaaattcctcttttgtaaaaccatggtaagatgaagagaataaatagaaagtcatcagaatgaagaggcatgttttccagagaaaagtttggatgtaccatagagaagatattccttcaaagggatatttcctagaatgggctgctcattcatctctgggagaatactgcaggcccattcccccttgttgagtgttgccaagtgacattcctcccttatgcagcttttccccctacacaccccatctggcatggatctgagcctacacagcaatgcccctgaagccaaggaagaaaaagtaccagcgaggatgtagtgtcagcagtaagacatgaggtctcgagatggagctagatatgtcatgactagaccacactggctgataacaattcagactaaaagatctgtcaatatggccgggtgcagtggctcactcctgtaatcccagcactttgggagcctgaggtgggtgcgtcacttgaggtcaggagtttgagaccagcctggccaacatggtgaaaccttgtctctactaaaaatacaaaaattagccaggcgtggtggtgcacgcctgtaatcccagctgctccacaggcggaggcaggagaatggcttgaacttggggggtggagtttgcagtgagccaagattgtgccactgcactccagcctgggagacagagtgagactccatctccaagaaaaaaaaggccaggtgaggtggctcaaaatcccagcccttttgggaggccaaggcgggtggatcacgaggtcgggagtttgagacacgcctggccaacatagtgaaaccccatctttaacaaaaatacaaaaaaatttagccaggcacagtagcacgtgcctgtagtcccagctactccagaggctgaggcagaagaactgcttgaacccaggaggctgaggctgcagtgagccaagatcgtgccactgcactccggcctgggcaacagagggagactctgtctcaaaaaaagtaaataaataaaaataaatctgtcagtataatcaggtcccctgtggtcccttcggatagccccacttcatgaagtgattgactcttttcagtctgggagtgaggtggaatgactaccagtggctaatcccaaggcagctggaataggtagatatacagctccctcatcccttgggacagaatgttccatccattatgtgcccattttttttgagttggagtcttgctcttgttgcccaggcaatctcggctcactgcaacctctgcctcccaggttcaagtgattctcctgcctcagcctcccgagtagctgggattacaggcacccgccactacgcctggctaatttttgtatttttagtagagatggggtttcaccatgttggccatgctggtctcaaactgacctcaggtgatccgcctacctcggcctcctaaagtagcactaggactacaggcatgagccgccatggccatgtgccccgattcttacgtttccatttatggaagagactgtgcgccactgtgaatccctcccatctaccaccctgtggctcagagctgcctgagttcccctgcatccaaaccctcagcttactccaatgacagacctaggcatctccccttagcacactcccaccaacaagctctgaccaaggccagtactcagaggactctgctcaaatggatgctcagcttcactgtccttctgggagcaaatcacagatattttccttatcctctcctctttcctttgctgtgcactgttgtcaacaaatgaggtcacctggctttaactggtaactgtgtaattagcctccaacttgtaagttaaaaaccatggttaaagattagcaccaatgaatgagagatttcattcactctgtaaatctgtgtgccaggagacagcctatctgcagcagtacgccatttgaacttgggcatcatttttgctccccatcacctcgaaactgagaactcaaagaatgcccaggttaaaaaaaattatcttgcttaggagatcaagcacaaagctgctatgtttctgattgtagaaaaaagccacaatgctgcttgattgttggaatattatacttttatttcttccaggaggcacatctaccatcacactggctgtcaacaatcatttgcatgcatcaagggcaggggaacacctggcaatttgataggtttatctcctcttcaaactccaaagcctaacgcttaagagtgccctgctagagatgcgaggctccaaggctggtgcacaatccagacctctaactctcctgtcttttcttggcttctgttttgctacttgataatcctattaccttttgccactgagaggacagctacattttgccattcctgccatggggcagcttggccctcagaccttagagggcttaggagctacagaagaagggattatcttgacaaaagggcatccaaggagtatggattggatctttaatctccagccccttgaaagctagatgcgaaaatctgagtactcatgtctatggataaaggaggagcaccaagtaagggtagccttcctctccagcaggctcaccaatctcttcctcatggctaagctacagcagtggcatgggccaccatgtgaaggccagccctaccacgaccctgtgcagacagggcctctgcacagacacaatattatttcccttaaagcagagccagggagggtttgagcccatggtgcttgttctggaaggaatgataagacaatgaagtcagaatttccattttccaactgggcaggaacatctgtcacttgctgggatgaagacacacatacatacaaccactgaatattcattctcttcccagactgcctggattacacagcagcaggaaatgatctgaggtcttcatgtgactctcggtacgctgcaccttcctgagacctggacccctgcactgcatggtggcatggcttcaactggctgctgcctatgacacacgctgaaaagagctgagcccaaatagcctgaccagccttgttctaaaatagctttgaggagaacgtttgacactctttggctaacctccataccccctgacccttttctccctgaacttgattcattggaaccatttagtccttcactgtatccagagtaatttagagctcagctatccgcctgcagggacaagattctatttgggtgaccttagtttctaggtctcctcctattgcccctagagtatttacatgcgggtgtgtgagcttggaggagaggcaggaaacaccacgtttacattttattatgtacagtaaccagcaggatgtggattaatagatgtccttttatacaagggactgagtcaggccaaacgacagaatcctgtcattgagatggaccagacgagtaaaggagggtaagggaactaaggcgaacaatacaacaatagtgtgacacatcaaaggagccacaagtctgcggaaaaaaaaaataaaagcaaagaaaataggaagttttcaagctagtgacttatccctcgtaacctcccagtaactgcctgctacctagttgtatagatgcttgttttcctaattttgatgccatctctctatagttatatataactagaaggcagttgactatgtttatggccaacatcaagcaattcttcaggcaggttcaggaactcctttgctatcccttcataattttttttttttttaagacagtcttgctctgtcacccaggctggagtgcagtggcgtgattttggctcactgcagcctccatctcctgggttcaagcgattctcctgcctcagcctcctgagtagctgcgactacaggcgcatgccaccacgcctggctaattttttgtatttttattagagacagggtctcaccatgttggccaggctggactcgaactcctagcctcaagtgatccacctgccttggcctccccaaatgctgggattacaggtgtgagccaccacgcctggcctgtgatcatttttgatgctttcctttgatcttccaatttctcttcctgctgctcactgtaagccactcctaggttctgcaccccccctcacttttccttatcgtggctttccattcaacctgaccactctctccaactactctacaatgccaacgtcagtgcgtctgtatcctggtgggtcagcttctggccgggaagaaaggacctctaaggacatctttttatacagtcaccagtgtgacagcatattacttagaaaaagtcatatgccatacctccataaaagccaaataaaaggaactctcttcttatttagatcattaatgagataaccaggaggtgggggcggggagacttctggtgttcaagtgatcagatctgtgagaggaaaactttttcacatcctataataaagagaagctgtgcccccaacttctccttattaaaggtgacatgtctggggagagtagcagaaagagctacaatacgtatttttaaatatccagtgtctatgtatgtgaatgtagaaaagtaccgcttgctactaaacagatcctgggattagtgggctttgcaggaacgtcctaaaacaggagcaaggtggttaattcagctagtgctgagatttccagccaccagagggctattctgacatggagggcacatttggggagtggtaataataaagggctattgcttcactgcttgaagcaccaataaggcacagttacctccttgggaaagcgtggccaatggctcacagagtgactctctggccttatggctaagtaaattcagtaagtcaatatttcctgcttatttgaaaaaaaaaaaaaaaaaaaaaaacaacaactagcaagtgctcatttccaaatgctaacaactctaccaataaaaatacagttatgggccacataatgacattttagtccacgacagaccaaacatatgatggtggccccataataccgtattttttactgtaccttttctagtttgtttagatacgcaaatccctgccagtgtgttacaactgtctatagtattcagtgcagcaatatgctgcacaggtgtggagcctaggagcaatagttgtaggtgtgtagcccaggtgtgtagcaggctataccatctagatttatgtacatgtactttatgatgtttgcacagcgatcaaaccgccccatgccacatttctcagaacgttctctccagtgtgaagtggtatgtgactgttctaggcttgtttcatttatacatttgttctcaggagtttttttcctagggttcctatctctgtgatcttctgcgggcatttttcactctaaaaacaaaaaatctcctggaaaccaaagctttcatcatgacttcttcaggcacgatggtatgtaagtacaatggtattctgtcctgagtgactgaggtgagtccaactggaaatattgatgtactcatttttgttcttactgaagtagggttactgattaatgaaggttagccagagccggaaataaaggtatttccatgtacttgagggtgagagtgcctgttaaggtaggaagaggatgttgcagaagcatcacttctgtgggtgcagacgctggaatgctaagaaaaatggtgctctgaaagcccaccgtgctctctcacctgggaacatccctaggctgggttgcaactccctgtgttcaggttctaccatcccagctaaactacatcttttttgaggacagaaaagcggaatgtggtctatttcaacattgctgtacagacacactatggggctgcacagagggctgctttcaggaaggacagtcacaaaggtcttgaggggaaggagctgagaggaaataaacaaaacaaacacgaatgaggtggagcccctcatctagaaaggcttccagttgctctccagtagacagcaaaatgaggagagaagagctgaacagccatccttcccgattttgctcctgcaaggatacctcctggcttaaaaattaatgtcagaatctgggtcaaagtgtcaacttctcctctgacattttaagtccaatgagacactgcttggtaaactgactaaaaaaagagcgttttaattcaggcagctggaagagcacttaaaaggcaaccggttatctgggaggtgagagataccattttccactccctgaggcttgcgcggagaactaaaaggaaggagtgttaaaatgatgtgtcagggattctcaaatccgactgcacatctcattcatttggggaaattttcaacactcagattcgcagcctcctatttggggattctttttccttaggtctgaggtaggacctggtctcacgcacagccaggggaaggagctccaggtggaggccttgcttttatgctcagcatcactggggtctgttacgggctaaaacgtgtccccctagaattcatatgttgaagtcctaagctgccagtacctccacctgtgactgtatttgcagatagggtcgaagaggttattaaagttaaacaaggtcatcagggttgatcctaatccactatgactggtgtccttgtaggaagaggttaggacacagcagaaaaacagagtgaaggtcatgtgaagatacagggagcagacaggcatctgcaaaccaaggagagatgcctggggaggaaccaacctggctgataccttgatcttacactccagaaatgtgagagggtaaatttctgttgcttaatccacccatctgtgttactttgttatggaagcccgaggaagccaagtctttggcctctggcatcaaagaaggcaacttcaacggacagaccggcaacaaagagaattatattaaataaactaaaaagtgctcttgaaggccaggcatggtggctcatgcctgtaatcccagcaccttgggaggttggggagggcggatcacttgaggccaggaattcaagaccagcctggccaacatggcaaaaccctgtctctactaaaaatacaaaaattagccaggcgtggtggtatgcccctgtaatcccagttactcaggaggctgagagtgaggtaggagaatcgcttgaacctgggaggtggaggttgcagtgagcggagatcatgccactgcactccagcctgggtgaaagagcaagactccatctcaaaaaacaaagaaacaacaacaacaaaagaaaacaacaaaaccatgaaaaaaaccaaaacaacaacagcagcaaaaaaggggtcttgaattactcaagtatgaagacatctttatttgctcaaatatggaattaaatttttttaaaaattaatttgagcagaaatgaaataagctgatactaatgaaaacctatcttacactgttttgagggacataagcttagatactatcacaaaaggtgcaatggccaaacatgacagtggggtcattgcttttatgtgctcacactctgatctatgggtcagtccgttcctttccaccctgctgcctgctgttctcttggtttccttcctcacactgctcatccacgtcagtatgaatggggaaatgaggctccaccccaatttccatcagcagcttctgttgtagtctgcagaggttttaattgctgagcaaaatgaaatttctggcttcaccacaaatttcatttatttaaactctgcctgtcctcttctaatcaagaatggtttagagcccatttccttggggatagtggaatcttcaactccctagaaacacctggacttttctctgatggaaaaagcaatgggggccagacgcggtggctcacgcctgtaatcccagcactttgggaagccaaggcgggtggatcacctgaggtcaggagttcgagaccagcctgaccaatatggtgaaaccctgtctctactaaaaacaaaaattagccgggcatggtggcgtgtgcccatagtcccagctactcaggaagctgagacaagagaattgcttgaacccaggaggcagaggttgcagtgagccaagatccagcctgggcaacagcgcgagactgtctcaaaaaaaaaaaaaaaaagcaatggggaatatgaggggaaatctggactctgagcttgaccttgcataatttgaacccttctgtctcggcctcagttccctcatctacaagatgagaagatcaatttgattggtcatcatcaataaatctttcagctctaaaaattccataactcttaaaatatcgcaattaaatgtcacacaaatttttcagtttccctgtgcatataaaagttatgtttacactatactctctgcaagacagtttcctaaaaagttgcatatactgtgagattttaacactttttcccccatccaaatggcatttcaaatgcataaaaataacttattcgtaaattttctttctctctttcttgttttagtatagcaccttgaaactaagatatttcaggtggaagtgcagggtaataggttgcagaactctcaaataacaatcatgtatgttttggtgggccatttggtatagtgtgatttcctgagaaactttaaaggtaagagtctgcactgaaaagtcacattatttactattacctggttgtattgagaggccagactatttaagacaaaagaaatccaagaataaacatgtttagtttttttggaaaaagcaacttcctacttctatttttatttttaacttcttgtactggtttttgttgcttgtgtttgaaaaaaaaaagtctaagagtaatcatgcttttttaaagtcatgcattatcatttgtattattttgataacttcaacacaaattgtaagttgagataacaacacacactctcaataccttgagcagaatattcacggtaagttgcaatgaatgaaaaccaaaacaagaaagaacaactgtaacccaagcatcatggaagcacactgattcgttttttaaaagagatacttagctagttcttagcaaaaagctaagcctaattctctcatagtcttaattcccacttggaaacatgcagtcaagtttacctacctccaccacaccatgatgaatggatgtgtactgtttcttcttcagcatcaccaaggtgatgacgatcactgtcgctatgacaacaccgcccaccatgagtccaatgattgcacctttgtttgaacccacatcttctgcaaagaacaccttgaaaacaaattaagaaaaagaattttaatttctaaatgcaatataatttacaatttataaacgcaattagaagaatttcatttcttaaatgcaggggacatttggatgaggttatataaaaagtttcagtatattctctgcccaactggttggtcaaatatttgatgcttactttaaaaaaaaaaaaaaaaaaagaaatcacatattttcctactaagaatgataatcatagtttatagaaggatgtacaacatgtggcttccccagttcgaggaagtctactttccccacaggtcaaaaccgaagtctgcagggacctgaaaccctttgacaggtggaacatttggtgagtggtgggaagatagcgcttggatctatcaaaagctggaaaggcacgatcatactaatgaaaggaggtcagcattttcctagtcatagcactctgagccctgatgtgtgactctaagtgactgagacttaggtgtttttcaactctgcagatgtcctaatttccttggagggacacttttaatgcacaggaataggcattctgaaacaaaggagttaaacaatagaaaaaaagatatcttgttacctacttttagctatagtaattctgcagaattctaattaacctttagcagtgtaatgctttttaaagcataatgttatttcaaagtgaagtacaggcaacaagaattttaagtcactcataactcatgctttctaactattgtctccagaaaccaaaatctgaaatgttgctttattcttgctctttatttggattaaacataaaaataattttgagaacattgtaaagaaggaataaaatttcatttactgcactacattgcttcatactgtttataaaagcaagtcattatttttcaactttatctacttgaatgaaattatagaagcacaccacaacttttatcatcttgttatataaggagttgatcttatgccagatgaagtaaaactaaagctaaatattaccacgtttgctctgcaacttaatgaaaatacaggcatacatagctttattgtacagtagtgcttacagatagtatttaaaaaaaaaaaacaaaaaggtttctggtaaccctgcatcgaacaagtctattggtgccatttttccaacagtgaacacaggttcacttcatgtctgtgtcacattttggtaattatttaaatattcaaacattaaaaattattatatctgtttggtgatctgtgatcagtggcctttgatgttactattttaattgttttggagtgtcatgaaacatgcccataaagacagcaaactaaatcaataaatgttgtgtgtgttctgtctgccccccaaactggccactccaccccctcaactcccaggctccctatcccttgagagacaacaatattgaaagtgggccagtaaataaccctacagtggcctcttaagtattcaagtgaaaggaagagtcacaggtctctcactttaaagcaaaagctagaaataattaagcttagtgggcaaggcatattgaaagccaagattcttgtgccagttagccaagttgtgaatgcaaagaaaagctcttgaaggagattaaaagtgctactccagtgagcacacaaatgataaagcaaaacagccttattgctgatacggagaaaacttttagttgtctggatggaagatcaaaccaaccacaacattctcttaggccaaagcctaatcaagaacaaggcccacaactgtcttcaattctatgaaggatgagagaggtgaagaagctgcagaagaaaaaaaagttgggagaggttgatttcatgaggtttaagggaagaagccatctccataacacagaagtgcaaggtgaagcagcaagtgctgatgtagaagctgcaataagttatccagaagatctagataagactcctgatgaaggtggctacactaaataacagattttcagtggagatgaaacagacttatttggaagaaaatgccatctaggactttcatcactagagagaagtcctgccttcaaagcttcaaagaacaagctgactctcttgttaggggctaatgcagctggcgactttgtttttgaagccaagactgaccattgtaaaagtcctagggcgcttaagaattattctaaatctactgtgcccatgctctataaatggaacaaaactgggatgacagcacatctcttaacagcatggtttactgaatattttaaacccactgttgagacctactgctcagaaaagactcatttcaaaatattactgctcactaacaaagcacctagtcacccaagagctctgaaggacaggtacagggagattactgttgttttcatgcctgctaacacaacatccattctgcagcctgtggatcaactttcaagtcttattatttcagcctcttattatttcaaaatatatttcaaatatattttgtagggctattcactgccatagatagcgattcctctaatggatctgggcaaagtaaactgcaaaccttctaaaaaggattcaccattccagatgccattaagaacatctgtgatccatgggagatcaaaacatcagcaataacgggagtttggaagacaatgattccaactctcatgggtgactttgaggagttcaagacttcagtaaaggatgtcacagcagatgtggtggaaataacaagagaactagaattagaagtggagcctaaagacatgactgaactgctaccatctcatgatcaaacttgaatggatgaggagttacctcttatggatgagcaaagaaagtggtttcttgcaatggaatctactcttggtgaagatgctatgaacactgttgaaatgacaacaaaggatttaggatatcacataaactcgatgaagcagtggctagatttgcgaagactgactccaattttgaaagctgttctactgtgagcaaaatgctatcaaacagcatcacatgctacagagacatctttttgtgaaaggaagagtcaatcgatgcagcaaacttcattattgtcttattttaggaaattgccacagccaccacaaacctcagcagccaccacctggattagcctgcagcagtgaacatcaaggcaagattctccacgagcaaaaagattaggacttgctgaagactcagatgatcattagcatttttagtaataaaatattttactaataaaagtaaagtatatacatggctttttttttttttagacataatgctattgcacatgtaacagactagagtatagtgtaaatacaaacttttttttttttttgagacagagtcttgctcttgttgcccaggctggagtgcgatctcggctcactgcaacctctgcctcctgggatcaagagattctcttgcctcagcctcccgagtagctgggactacaggcacatgccaccatatgcagctaatttttgtatttttagtagagatggcatttcaccatgttggccaggatgctctcgacctcctgaccttgtgatccacctgccttggcctcccaaagtgctgggattacaggcatgagccaccgtgcctggccaacataacttttatatgtactgggaagccaaaaaatttgtgtgacattttgttgcaaaatttgttttattgtggtgttctgaaatttccaaggtatgcctgtacctccctaaaaaattctttcaatttagcctcaaggtagtcaaatgactgatttttctaagctgaaactaacatactagcaatctggaaaggcaatataaaatatagcaaatgaagcaacttctaaaagtgttttactcgtggtttataacaaaatgagaaattgttcataattattccctttactaaacaaatatgctagctcaacatttttatgaaaagcaaatcattaattagctaatatactagtgtgaggtaatcaggaataaatacaagtctggacatatgcctgtgcctttaagaaaatactgtaattttgtaatattcattgcactaattataatacattatcttaactagtccagtagagggagctgattctcctaattgctgccgctgccattagtcactgtcgcattataggcgttagtgtaattgtggggatgggcttatatgacacaggccccaggccccgacaaatgcaaatctgtacattaatcgtcagctttctaccccaccaactcttcaactctttagtggttccccagtttttattaacctcttcagcaacagcctcatcaagagaaaccctgatcttataacaactgatactagattatcttgccaatgaaaaccatgcttcaaaaagctaaatgtctttctacaaaaaaagaactatgggagttaagaatgcaaatccaaatcccaagtcagttttttatttgctacaattatttggagtcaagtaaggcataaataataatttggaggtgtttcttttagagattaatactaggatttatcaactttatgaatattgaaaagacattttctgcttggaaaaaagtaacactcacacacacacacacacaaaacaaaacaaaagaagtgcctgagataactttaagtattattgctatggaaattttcttaccatttttctgtccaccactgaatgtgataaaattgtcgtcttcattaatttaaccctcttactgcacctactgataagatggaaccctaacataatccacgatttgatttatctccatttctaagcttttggtaaaggattttatataactactagagctgaccacaaaggagatgtggctttttgatttactccaattctaacattaggggggaaaagtgatttcatctgaaaaggaagctgctgtcttctttgcacaaaccttttgatgaataacactatcgggaacatcatggggtcctgctcactccatgatcttactcttgcaagagaagttaaatcatgggaggtaggggagggaatgaaaagaaagagctgggggagaaatgaatgggtaaaggaagacagttccggatgtgaatttaagccacataaagtgttctgtaaaaccaagcagtgtatgcatgtgtttgatccttcaaataaacctattgtaaacctattttcccagaaaacacagtggaagtcaaagtggctgctatattgaaattaattccactttaagtcccgagtcatgcacgaactttgctgccttgtagtctgaaagaactatacatacagcctctttcttttcttttttttttttgggatggagtctcgctctgtcgcctaggcacgatctcagctcactgcaacctccacctcctgggttcaagcaagtctcctgcgtcagcctccccagcagctgggactacaggtgtttgccaccacacccagctaatcttttttgtatttttagtagagatggggtttcaccatattggccaggctggtctcgaatttctgacctcgtgatccacccgccttggcctcccaaagtgctgggattacaggcttgagccactgcgctcagcctagcctatttattttcttcatgttttcatggtaatcctataggcaagcattgtatttttatcttttccttaatttgatttctagcacaggatgaaccagagttaataggtcatttggcaagacaaacagtagtggaaagaggtaaattattttacgtaccaatttttgatgatgaacttcatatcctgagtcatgtcggaattctgcatccatcttcacttcagagatctcctccgtcttgatatttgtcaacccagaacctgtattacatcataattaaagtatgcaggacaaccaattagttttactcataaataataacactgtaagacaaagcctacccaaaacttctttctaggcctgaagttagaagaaaattgataaatgactcttaaagaaaaatgataccctatatttaaaacttcaattactacctattttgaacaaaaagaaatgaaagggtaagggaaacctgaaagtaaggcttctgctgcctttaaatacatgctataatttttgaaaatgggggaaaagcagaagttaaatcctggttgagaggttggcaaggatttgttcctggaatatgttggcttggcttacgggcttattgtttagcctattatgtgtctttttccatgtgcactcattacttcagaaataataataaaaggctttaaaaatgagcattaattacctggtagaacaaaactgctactttggggctttgttccaattacaaataaattatgttcatgtatctatgcagtgaagcgttgtaaaaattatataattttagtcaagtgttctagttacacagattgtaattggttcgtctgctgaataaagagctatagtacataattttaaaaatgcttcttagcaactaacagaatttataacctacgaactcttccttttctataaattgctatatgattcttaacactaattgttctgatgaatttcattattcaaataataatttgaagcttaaaacaaaatgcagagtcatttaaaaaccaaaaacataagtaaaaaatgtaaatgtcagtgtccatgctataacatttaattatcaaacatcagaattttaggatgaaaagggcttttgaagtcatcttctctaccgtgttcccacccaggggcagattgtcagttcctgtttgaacatagaggaatgtatcaatttccctccattttttgatagatttgcctgcccaaactgtcctttttttacatgaagccagaatcagcttccctgtaacttccatcctttgagcctgattcaacacagagcaagcctaatcctcccttccacattaaaaccttgaacaggtatcacgaccctaaggagaggcatgttcctgctggttcttgtcttacttgggctacacattcccaattcctttggctcccaggggaattcacttcctgctcttggcctaatcactctttcaatcttgtctacgagattctgggaaacttgtgacacatcttgctgacactgaaaagcacaatgtccacagcatatgatgtgccagtctaagagcacagcctatacaaggagaaggtaaggataatctgacaaaacctaggaaatccacgctggttgtgacctagcaccatttcctcatccaattgttcaaaaagcttccacttgataacctatttgaaaagagacccacaatcaatgtcactctatacctggcttacagattgtgaagctatcttctctcctttttgctattcagaacttcattttcctatccctaccttcccagctttccacaaagaccacaggcaatggtgctacttccccttcaagttctcttagcctgcagttggtctgggtcataagaacttggacttgggtagcaagatgtcatagtttaaaatatatccacaaatttgctgatactccttccttcaagagggagaacttgattcccttccttcgaatgtggtcgggatgtagtgacttgctctagtgaacagagcatgatagaagtgatggtgtatgacttctgagactgggccaaaaaaggcactaaaacttccttaatctctttcctggacctcttggtgcaggggtgcgagatgccatgttgtagggacgctcaagcagcattacagagttcacatggtaagatactgaggtctcttagtaacagtgacgtgagtgagccacgttggaaacagacccaccaggtccaatcaaaccttcagatgactttagctcaggcagtgtcttaactgcaaccacatgacggacactgtgccagaaccatccagctaaaccacatcccaaatcctgacctataaaaactgtaagaaactaatgcttgttgttttaagctgctaaattctcgcgttatttgctacgtagcaataggtaactaatgggctagggctttcttttctcatgttgatctatctcgggctttaatttcctttcatcagaagttcattctctttaatatagacataaaaggcacaatggaagtgggacagtttccctttctcattctttaactctggtcctctcaatgacctaaccctcaacccccaacttcttgctacgagacccacagagttctctattcttatttattttcttactttaatattgttaagtattttttggttaagtttcaactcattctgctgaaacgaacctttctgacacttatttttatagggtagtgatgctaaaactctcttaattctcactggctgtatattttaatctttctatagcccttttaaatctgagatccttatataaccagtgatttctttagagctcactccttttctgttattaagatctggcaacgtgccaagcacggtggctcacgcctgtaatcccagcactttgggaggccaagctgggtggatcacttgaggtcaggagtttgagaccagcctggtcaacatggtgaaaccctgtctctactaaaaatacaaaaaaaaaaaaaaaaaaaaaaaaaaaaaaattagccaggtgtggtggcgggtgcctgtaatcccagctactccagaaggctgaggcataagaatcgcttgaacccggcaggtggaggttgcagtgagctgagattgtgccactgcactccagcctgggtgacagaatgagactctgtctccaaaaataaataaataaataaaagatctagcaacacaataggttagaactatatttctgagatttttaagaaaactttcttgaacagtttgaagagtcttcccttttagattttggagccaaatatttatactgaaaaataaaagtaaagaatgagctctggccgggcacagtggctcacacctgtaatcccagcactttgggaggccgaggcgggaggatcacgaggtcaagagatcaagaccatggtgaaaccccgtctctactaaaaatacaaaaaattagccggacgtggtggcaggcacctgtagtcccagctactagaggcttaggcaggagaatggtgtgaacccaggaggcagagcttgcagtgagccgagattcgtgccactgcactccagcctgggcgacagagtgagactccatctcaaaaaaaaaaaaaaaaagaatgagctctcggccaggtgcagtgactcatgcctgtaatcccagcctttgggaggctgaggcgggcaaacagtttgaactcaggagttcgagaccagcctagccaatatggcaaaactctgtctctactaaaaatacaaaaatgagccaggtgtggtggcacatccctgtaatcccagctgcatgggaaacttaggtgggaggatagctttagcccaggaaatgggggttgcagtgagctggtatcatgccactgttctccagcctggaaacagagacaaatcctgttttaaaaaaaaaaaaaaaaaaaaaacaaaaccaagagctctccactaaaaactttacaagcccacactacttttgaaatgatactgtgaatacttttggtggtccaaaaaaaaaaattcatattatcaagtcagcatgacagataaattcatgtttacagctcaatagtttgagaagctcttggcagaagagctcttgctataatagttcatgtttgtttagcatgaatagtcatctagggaagactttttacattaagcaaatcttactaaaagacaaaatcagtaagctggcacatagggaaatattcataataaggtgataatgcatgtaataaaatgtgatgagtagtttcaaataaatggcagggaccttggtttgcaggcttacttagaggtctttcttgagttgtgctgatttcaccctaagccctggtgactccagctctctcttcctgtaagtcatgatgagtggacagagccttttgttcatgtgggggctaagggaggtatgtccttcatgacacctcttgcatggctcgggtcaaggacctggtttccctttatttggactgcagaagggtggtgatgaattgtaacagaaagggtagctttctaccctatgtgaagagctcgctaatgtgtttttcttttttattctggtcaaactgtataattagtccttcagagtctattttttctttggaagtaagccaggaggaggagctataatggccactatgcccccaaatcaccactgttattacaatggtccctacttgacactgcatgctggaagctaccatattctgtttttttagatatgagagttaaggagaagccattttcctcagtcatgattataaagcactgggtgggggaaaaacaaaaacctttttttaacttgtttctgaggacaacagtgattattcaaaaacaatgccatcacttgaacggcatgacaatcttgggaaggctttctaagtttggaaaggctaaagatataattcggcacattagactcaagtgggtggtctctaaaatgtgaagaagaaccaaagctatgctacaaaacacggggaaattagcccaaatgtttgataaacttactacaagcacaaaaacagaacacacgcatggcttaatacatgtgcagtaaatactgctattcatagacaaaccttaactagaatcttcctcacttcatatctgagcattctttctcaactttagccatcttactgggcaacccaagcctacgctgtgtatgaaaggaagcttggcttaggccaccctctcttctgaatagaattgttcccttcttctttgccaatccaggtgcctcaaatctttcataacctctctggaagcccatctccagtaagttctctacttaacatgcccctgggttagtactccatctcctcccatcacagaacattcttgttagcacttaatgttgctttgtatttccttgtcttccaaattccatctcatgtttccaaatatgcaaaattccttctattatacctcaagctcctgagagcagggaccctaccgtttaatttctttcaaacctagaaagaatttagtggattgatctttgtgaaatccccaagtgacatcatattcttactgttatgagaaaggttttggatggttttctcccaccagtgtaataccattaactattctctagctcttcctttaaaacacactgtttttgtttgacagcgtttggaggtgtcctttttgttagatttagattaaaaaaaattttttttaaaagaataggccgggcatggtgcttatgcctgtaatcccagcactttgggatgccgaggtgggtggatcacctgaggtcagtagttcgagaccagcctggccaacatggtgaaatcccgtctctactgaaaatacaaaaaaattagctgggcatggtggggcgcatctgtagtcccagctacttgagaggctggggcacaagaattgcttgaacccccgaggcagaggttgcagtgagttgagatcgtgccactccactccagcctgggggacacagcgagactccatctcaaaaaaaaaaaaaaaaaatcaaaaaacaatttttttaaaaaagaaaaaaacattgactggtagtgtcacctggtcctggatgtttcaatagtaacatataggctctcctggcccaatgtagaaatttgataaaattgaatgagtcgaatgagcgctttctaagttacattttatgcttgtagatgaagagcatgtcttttaaagagaagcaccatgaaaaaagtcccaaggcaaatgaccaacctgagctggctgtggttgcaattagaactgaactgaccctcagcccgaggccttacaagttggctgagcagaacaggaatgtcaactcctggctccttgagattcccttacatgacattgacaataaggaggacattagaagaactgaaactgtctctgactcactataatttaagttccccttaaaagcctacagacagaaattcataaatcaacgagaccagctgtcaagacgtgtcacactactgtctctgctgccactgttaatcacagcataaaggcatgaagatgccacaggcagactctcagtcttcatcagtgaccgtgcttggaggcagtcatggctcgagcctgtggtggaagtgtgagggacagggtgggtctcctggtctgctgctgactgtatctgaaccaggcagcaaaggttgacctctgtgtattaatatcttcaaagaaagttaattccctgttctttgactatcgcctggggacattatgaggataaagaagaaaataaatatggaaaagtatgtgttatttgggattaaaatctccctggaatacacaaatttgtcaattcaataactttcttcctctttttgattcactgaaagcactggctactatcagttgggtgaggttgttcatagagtagacaccaggcacatatatgcttctgctgtgctatgacattattcataaaataaaaatgtgtttcttcttaatgtttgtgaaactgtaaaaaaagaagtgtctatttcagtgttaatgggatttttaagtaatacataaaaaaagggcttatgtgcaaaattatgcatccacatctgttgtgttactttagccactcattgagaataagtacatacaacccacaaaacagaagatgtattttgggctctggaaagaaaccaattctggtattttcaggaaatcatgtctacttcagtaactgattgaagtttgagcccagttcagttagaaaattacccatctggacaccaaacaagaaaggagagatgttcacactggtatccaagtcatcacctgagagtctacatctatctgggcttctgtttttaaggacaggctgtatataatcgtctctgtttttgttttgttttgtttgttttaaagaaaaaagaaaaaaaaaaacccaaatttggaagggctctcttttaggtttcaaagggaaagctcagaaacaaaaaaaatcatttcactcggaacttgggaaatgaagagtaaggaatagtcaaggggaatttttaaaagtttggtttctaaggtcacttcaaattctactctgcagtaagtacaattgagagaggcttaaaatgcagaaaggagacaacgtctgctcgagcttaggcccaagatgcggagaggcacaagtcaagcggttctgatacctggtcgagtggtcagtcctcggtcggcagcagggcgggcatcaacaggctcaactgggcacaggaagcaagggacacagaaagcaaacaagacaaatcaagatggtaagtcgtggctcccaaacatagtcgagcagggaaaaaagcatatgcaataaacaagttacaaaaaaggagcagccagaaaagaaccacagtgagttaatcccgagcatcgaggaccaggaggggcaccactttaaatggcttatcgctattgatgtgccagtcctgctccttagttttctaataaaagccctcaccaggatacgcagcaacatcaaagaagaggggtggggagggtggatttccctctgagctagtttagagatagtttcttggcttttgattagaaataaaatattcccagcctagcagaaaaccttaaagatacttccttttacaactgcccaatcttatcttattttacagttaattaactacaaaaggactctgttaaatttccaggggaagtgcaaatatgaatttatcaggagagcaaagttttactatataatctgccatttagtgagtgaatcaaatttgtccttagtatgagggcagaagagggaaaccgcagtctttttctcactttttcaaaaaggctggcttccatttgacagatgacatacagctgaaacgtgtgaaatgaggatatttcattttatatttgccattgttcacaattttccctttttatgtgttctgggtccgacccaaagaaagcagtgtggacagcatgatattcctcaccatcatctgacctttccaaagcacttctgatgctcagaaaatacttccttgttttacgctggcgtttgaagaaacaaggaatggggacaaaagtgaagtttttaggattaataatggtcatagggtaaatgaagccacggaggtaggtgcagggggaagctgctttggtaaggtggcaagtgtaaagggaaaaaggtaagacaaagtgagcacaggtgctgaaggagacacggtgtgctcgatgaaatggcttctaacaatttcagcaaaaccatccagcttactgatgcacacaggccaggcattcaaaggtgggattctcagtccaaatcgattttggatgccacatgttaatagaaacagtgagggagaaaaaaagtggcagtaagccaagtctccaaaatataagaaaatatttccgggagcactaggatatttggatgaaataaaaatttggtcctttctcatgtagagactggcagcatggtggagtcaaaaggagggtgaggcatctaatcccaggcctgggcccaacatttacaatgtctgtggccttgggatgcgccacttctgtggctgtttctccatatggaaacagaaatgttaacatctgcatcttctaattatggtgaggaacaaataagtaacctttaaagcctgtttgagaccctaccagatactacagaactgcactgattaaatatcctatgattaaatattccatagtaactactgatgcgagagtgactattctctagtatttcactagtgcattagaggaagacatagttcacttccttctgcaactcccaaatacatttcgacaatgaggtttggtttttctatacttcattttttttcctatttgcagcaacctgtaatgagtaactgtattactccttgtaaaatgcagttagttgaaaggtcattgtactttgtgagaatttcctgatgatgagggacccaatagtgcttcaactgcagttaagaacacaacagaccacatgcacgagggcaaacgcgtaccttgaagtggtggtgagcacatacatcaatagttacgttattagaaaatgtatatgcaactcggggcagtaagttaagtgtacctgtggtttaaatgcaggctgaggagctggtagtcccacgggccactgctaatgtcaccacttactttctctgtgatctggggctaatcacattctttctgaacttcagttgtgtcacaaagtaaatggtttttccagggttcaaatgcgtatacttatgtgaaagaaacttacaaatgatattgtcctataagtttctctgcctctccccgctcttcttcttcttcttctatttttttaaataggcatgtattatttaaaaacaataataaaaccctaaccctattttttaggaagattaaacaaaactagtttcagtgacataaaccctaatctgctttaaaagattgaagctgatttagtataaattaatgctcaaaaaataagtagctcagggagcagacattaaaagttttttaaaaggcaattatgatatcattgccgaaaaaaaagaatacacaccaacaaaacaaagtagtgtgttatttcccaatccactgcaaatactttccaatttttccaattgacctttacttaaccagacagtaacttcatcaatgaagtgctaaaaaacatcttacattggctgtttagtaatttaaaaacaagaaatacattatcttagctttaacttttaatagagttaaaataaaatgtaagcagaaatgagttattctcttgctctcagtagctttgaatcaaatcctttgctgtaagaggagagaaacagaatggtcagacctctgggatttttgagtctgttacttctggtattctttgtaataaacctcaactattaaccgtgctgccttgtacaaactctctaccaggccaaaggtaatgaggaatcagcagtacaccagttttacatatagataagaggctgacaagaactggtttgtaagtttaatgaaatatttatttaatctaaatttcaacatttaaattggcttcctcattgcctctataaagctagttaaaaatatactagaaggcagcttcacattttgcaaatacatccatacaagtcttataagacctgctttgtctctttaaaaatattattttatctacatattatatctaggtattatctacaaagaggcagactgttggccacaaagacttgctggcagtcactgcatgctatgctgctctttgtggctgcccttctcaggcagtcaggaaaaagtagaacaaacacaaatgtcatcaacgctaatgcttccagccagatcatttcacgatctgtgagcacaattctgtaacaacagcttcatttcagcctagccattcatttaggttttgtggatgtgaaaaccaaagaataaaaaattgttaaggcaaatcacagcacattggaaaactctgatatgcttattttcttcaatgtaaatttaaaaaatgggcatcagaacctcctctggatttcactgattgttcttaagaaaaacaacaaatttttggtaagcatttgaaactatgataatgaggactgcatgaagaacaaaaggaaatcctttgagaattttagatattttcagtagttgggtgtatgtgtgtgtgtgtgcacatgtctgtacaaagaaagactaacaagtttctggggagaggtgggagacggtgttagaagagagacggctttaggactgtatctcattatatggcttattatattcattattttaaggatacattgttgaggccataaggtgattcatcttgagacaggctgataaagtctctctaataagatcctggctccattaaaaaaaaaaaaagctaccactgacatttactacgttccaggaattttgctaagagcttttttatgccttcttatttaatgctcatactatacctctgagttaggaattattgtcaaccttattttacagacgaggaagcagccagagaggctaagtaacttgctcagaagcacatagcagggctggaatttaaactcgggtctgtatcattcaggagttcaggggtatggggtagtatttaatatcctatgagatgatggccgtctattttatttaaaaaccaattggggccgggcgccgtggctcatgcctgtaatcccagcactttgggaggctgaggcgggcggatcacgaggtcaggagatcgagaccatcctggctaacacggtgaaaccctatctctagtaaaaatacaaaaaattagccgggcgtggtggcgggtacctatagtcccagctactcgggaggctgaagcaagaaaatggcatgaacctgggaggcagagtttgcagtgagctgagatcgcgccactgcactccagccagcctgggcgacagagcgagactccgtctcaaaaaaaaaaaaaaaaaaaaaaattgcttaagtggctttttaaattgtttgctataatcaatatatatatgtcaatgttgggactgataatgaagagtactgcaactcaagactctgacactgcaagttctattgcctcccaaaattgttataccagattctactgttcaaacagaatcatccaacaagaatatcagctcttttcatgagacctaggcaatgtaatagctgcgtgtttgtcaagtatccagaagtacttaatcaagggctttgctcaaatggacatcctggcaattaccaagggttcacagtgtatgtgtgtgtgtgtacattcacacgtgtgcacgcagattttctcctaaggctgatgcaacaaggtatgctgttagtaaaagagcaaatttagcgtgcattcaatttacaaaatgagatcggacatttttcactaaaaattctcattagagactgaatgaagaggaccttcaatgaccaaaatctatctacctgtaaagaaacaaaacaatctgcactcaatacatttaacaggacagttttccaggtctttgataatgaactgtccctaaaattgttttcttctatgtgattaagaattattttcataaatggtaaagttttaattatttttacattgtcagtaacatgctgtttgctattactgtaaggtgccctttttcaaattaaggaaacaaatttggggtgatgattcacattgtgaaaatagtctatatattttctgcaatggttctttagaaaaaacttgtccagtacacttaaggtctaatattatatttagatttagtactaattgcatgttataaggtatatatattttttactttatttatttattttttttaaatttaaagtctcgctctgtcacccaggctggagtgcagtggtgtgatctcagctcactggccacgtccgcctcccgggttcatgccattctcctgcctcagcctcccgagtagctgggactacaggtgcccgccaccacgcccggctaacttttttttgtatttttagtacagacggggtttcaccatgttagccaggatggtctcgatctcctgaccttgcgatctgcccacctcagcctccctaagtcctgcgattacaggcgtgacccacgatgcctggcctataaggtatattataaatatgaaatctccatcaacatttgctgctttgataaagaaaatcaggtaaagtgctgttgtgttcttaaaaaacatgttatttgtatctagaaatcaaggtgtttgtgtgtaattgtatacttctgaacatgtagaaaaagataaaagaagctgaaagatattcttgcctgaacaggtgtttctgctaagaaatccctgtgaaaaaggatgccatctactgctcaaatttgttgatagagaagaatcttacttctctgaggtaccaaaggaaaaaacatttagagcaatgtgctccttaattttggcagctgccttaaatttaattttctaaacacaaattaagtcttaagcaaaattaaattttatttatatgtagttctctatctttgcctttaacatttaattcaatctgaaatttcatgtaagaataagtagccagtgaagactactttggtgcctgtcaaatctgcatctctgcaggccctcaaaactcctctctgttggtaaactgtaatttttccttatttcactatctatctgcttttttggaaggtggcattctaggtcattacgtcataaacacaagttgaattttgtgcttccattccagagggaacaatatacctcacagttaaaaaacatttctaaaaaattcctaccaaaagtcatcacttaagaacttagtctcctggtgcctccatttcctcatttgaaaaagtcataaacataataatatgatatacagtacatgctctttatgtatccacttttgttatataatgtaccattttatattaagaagaggaactggaaaataaaaattagaagaatgttattgccacacattttccttgtgaagaactgcctcttcaataatacactgtggctccccttcgtccgggagtgttcactcgaaggataatattccctagaatgcaaacctggacatgtgcgaaacaagaggccctttacctgcaaatgttatgtaaatcattaccattttgttttgccacctatacaatggagttgttgtcttttccaacaattggcagtttacatgctttgcagcataaaaaatataaagaataatttacacagatatattattttaatgacatagtaactcctagtatttactttttaaagtaaaattataatgaaaatatttatgactacatcaaaaaaaattcaccactcaagaacatacaaaagataactctctctcttgcacacacgttatgtatgtgtatatatacctcccagaacgcccttgctggctcaggggactcttaccttcgttttctgtgttggctggcacagagtcagccccaaaagaatgccacggctggagatcgtccaggctgaactctccattcacgggaaggagctccacggtggttttcgtttcggtcaaagatggcatgagagcatcgtttccgtaactgatccttggttcactaatcatgttggccaagacgtcatctgaatagttttgctctttctgaagcagctcatctaaaccaaacaaaaccatctctttggtgagtaacaacaatcacaacagcagcagcagcagcagccaccatttacttctgccaggcaagacttcaactgctttcacgtgcatgatcgcgtttagagccatgacataggtaccattatcatctcccttttacagatgtgaaaactgaggcacatggcattcaagctacttatgcaaagtcgcagctcacaagagctgctggcaggactgcaggcaggagcatggcagccggccaatgtgctgcagcgtggcactgctagaggtgaaaggccacaggggctcagctgccatttcctcctgacacagttagacgtccctagtatacaatgatcgcacaggaataaacgccaggctttggtgtggcggcagtaagtgaggcacaatctcattcaagctgaaagacaacagacaatctcctgtcttgccttgcacacttgcaaggataagaaaagcattaaagggccagtagtttgctaccttcttgaatagttttcactgtcttgccttgaaaaaaaatctgcatttcctaaatgctcctcttgtgctgcatgacctatgctctgaggcaacaaggaaactgttcccttgcccttccagatgtagccctgcagacagacatccagccttctctggacttaaccacccctggctccccgtatttcccaatgtgagcagacaccaaatatcctgcctttctcctctgttgcttccctttccaaagaatgctgtcagtgccgcctacccccccactttaaaaattgattaaacaagaatcagctttatggaacatcattgacttatcttttcttactggaaaaagagagcttagaatataatcttgtatcatgtgtaattactgctttaaaaactgaccccaggatatgaagatttgtgagtcttctcttatgtcaccaaagattcaccatgtttttctctgatttttacaaattagagaccgacagacagcactgcactattaacaataatatttgattaaccaaaatgtctcattttccaatcatagctgtgtcaagagtttgctgtagtatatatttcagacacatcactggttagttttattgctagagaaaatgaaaataagatcaggatttaaatttgatttgtaacattttacaatcatctttcaaattctcttttctattgacaaaaaatgtatctgaaaaattaaaattctgttcaaatatacccattaaaataatttgatggaatagcattaaagcttgtgattaatatcttttcatgtagtcagttttattgcaagtgattttaaatgatggaagtcccaagcaaattagtccttttgaagtctaatctgagttataatatatccctattcactgtggcaccgtttctaaaattcaatacttgatgcccatgatgacctttcccttacagataaaagaccctcattagatttcctccaactttttcatgttttacaaagccataggtagcggctaataacttagccaatgtctgattaaataaattaaatgagcatttcttttatataaatcttttgcttgtgactgttaagcacttactatgctaaagagaggatattctggaatactaataattattggtgcatacacattcatcttgacaggaaataacctttgccagcgagaaagctcttgaactccccaggggctacgctgttcttgggtctgtggtatctactatcacttaccatgtcctttatttggaaatgttctcactgtttcgcatacacagtacttatcttcttccctgtgacatctctgaataactctttttactctttttttctcctctcttcatccctgtcattttcttcttgtatctctttccatctctttctacaattctcccctttggaaatcccatcgactcttgaaactctaaagatctcctacctttgggtgaatctgaaatgtacttccccagctttgacttctccctcccactcaaatttgtatatttccaacagtttgctggagataccaacttagggctccctcctgatccatgcacttggtaggtacacaactgtactcaaggtccctggctttcccttccacctttcctgttttctaatcatggcagaaccattctccctcccagtcacaggcttgaatccttcagagccatccaggactccctgtatttcttcgtgtccagtactcacactaccgacaaatccttttgcattctatttctgaattctctcagccatttcctgcttgcttttccacaccaccctcaccgcccctaggaatatgattacttttcgcctggataattacgatagtctcctcactgcttgctatggtctgaatgtcccccaaagtcatgtgttgaaacttaaatctccactgtggtagtagtgagagatggggtcttctggaaatcaagtcatgacagttccaccccgtgcccccgaatggactactgccttctaaaagggctagaggaaaccagcacaggcccctttatgtgcatctgccatgtgagaacagtttttgctgcctctggaggatgcagccacaaggcgccttttttttttttttttttttttgagacggagtcttgctctgtcgcccaggctggagtgcagtggcgcaatctcggctcactgcaagctccgcctcccgggttgacgccattctcctgcctcagcctcccgagtagctgggactacaggcgcccgccaccacgcccggctaattttttgtagttttagtagagacggggtttcaccgtgttagccaggatggtctccatctcctgacttcgtgatccgcccgcctcggcttcccaaagtgctgggattacaggcgtgagccactgcacccggcttgatcctgggcttctcagcctccagaattgtagtatttctattgtttgtttataaattacccagtctctggtatcatgataacagcacaaaccgactgagacaatggtctccctgctggtttttattttacgtttggttcctgaaatcttagttcctgacacacaagaatggctccctctttgtttcagtgggtcttcattttctaccgaattaattccaactcctttgccagatgctgaaggccctctgtggtctgggcccaccccgtatttctagccatggaactcacagctccagctgtctacaccacacctctctctcaggctaaatagcttggggtattcccacaaaagaccatgcatacccattctgacacttttgttttctattcctgctatcttggaagcccatctctgctcatctacgttatttgaactctttagagcccagctcaaatgccctctcctgtatgactctcctctcccaaggcaggcattattaatctgatgggacaaggagactgaggctgggagaaaggaaccaatctcttcaagacccaatggccagtaagcaccagtgctgaaatccaagtcctgggcttcataacaccagccttcccatgttcagcccctatctatttcagcctctcgtattatcacaaaagtagctgtagaaattaggcattattaagcatgtctgttccaatatctttagcagtctcttccacccttgtggatttgtaagctgacttaatcaccgttagtcctatggaatggttattgcttttggtcatcaaataagcatttctcaggcaggggcagctggaaagggccctgtgcccatcttagcccttggcagtaaaaaggcagaggagcaaaagatcacagtgagaaatcttacacttgtacttcacagaacagtcaggggaggttgaggtacgctgtagtacccttttctcttttctctgttacactgttggtagaaaagttcctccaaatggccaccagcatgctgagccccatggtggttaattatattcattttcagaaaatgtaagtgaaaaagtgacagattcaagaaaaggtacatttttagcagagtgaaacacacttagccttcgttttttttttttggtcgttgttcaaaataggaagaaatccacattcctatcttaattcaacacagaaaatttagaaataaccacccctggctatgtcattcagaacaacgaacctctgcctcctgggttcaagcgattctcctgcctcagtcccgagtactgtgattacaggcacacactaccatgaccggatagtttttatgtttttagtagagacagagtttctccatgttggccaggctggtctcaaactcctgacctcaggcgatctgcctgccttggcctcccaaagtgctgggatgaggcgggagccactgcgcctggccgtcagtgtagttttaagagaaaaaaagaggtagacatgatggattaccattatcagaagtggaattcaatttcgtcatcataaaatgtctaaggcagccagctacctgtagacatgactaagggctcaggattttaccagtggcttacacactggcactgggcaattgagcctatgacaaaatacccagagacaaatatgattctttcattgttcattctgagtgggactttctttgacttccatggtgagactaatcacaccgaaaccacacttccactacattagtggccctgatggattatccttttatctgaattaatttaatacttaattacaacactctgatggcctgcaatggggattttcagaacttttaagcatctatatttgccaaccgctatattaaactaagagactgcttattttcctcccaagacttattttttccccttctaaaagctatttgttatgacccaaaattgtagcgtttatctttgaagtcaaatatcttctataatatccaagcatttgaaccttgtagttaacagtggaaatatttaactgagtttagtggtgataatatttaaaatatggcttcatcaataacagaggtatttaatttcaaataccaaacacctaatgaaccccatcaccttgctcttttacaaatgcttcgaggtggccaggcgtggtggctcacgtctgtaatctagcactttgggaggccgaggtgggtggatcacgaggtcaggagttcaagagcagcctggctaacttggtgaaaccccgtctctactaaaaatacaaaaattagccgtgcatggtggcggacgcctgtaatcccacctacttgggaggctaaggcgggagaattgcttaaacctgggagacagaggttgcagtgagctgagatcatgccactgcactccagcctaggcaaccgagtaagactctgtctccaaaaaaaaaaaaaaaaaaaatgctttgaggatgtatacgaggcatacttagagtaacagagggaagaagccctaccacttagttatcattgtaaacactttaaagaaaacaacatcaaaagataataatttcatcttcaaacagctaaatattttgttttttcttagatattcatgatcattcattttgagaaaaatagccttataaataaaagaactgctgaataggaagcagatgaattcatccaatattcttttaattattaatccactagccaaatgtcttctaagaatttaacggtcacatcttacgattaaagaaaataaaatttatgggcattaaatcaatcagttatgtgttacaagtgtcagttataattactgaacagcttcttccatccactgaacacaagtgggttggagaagaacattttcttcatataaaggaggtgccactcagccttttccctgtaaagtctggctgttaaagctctgatctgaatctatccatctgacaaaggtctaatatccagaatctacaaggaacttaaacaaatttaccagaaaaaaaagaaaaacaaccccatcaaaaagtgggcaaaggatatgaacagacacttctcaaaacaagacatgtatgtggccaacaaacatatgaaaaaaaaaaaaaaagctcatcatcactggtcattagagaaatgcaaatcaaaaccacaatgagataccatctcacaccagttgggatggtgatcattaaaaagtctggcaacaacagatgctggcgaggatgcggagaaataggcacgcttttacactgttggtgagagtgttagttcaaccgttgtggaagacagtgaggagattctgcaaggatatagaactagaaataccatttgacccagcaatcccattactgggaatatacccaaaggattataaatcattctactgtaaagacacatgcacacatatgtttactgtagcactatttacaatagcaaagacttggaaccaaccaaaatgtccatcaacgatagactggataaagaaaatgtggcacatatacaccatggaatactatgcagccataaaaaaggatgagttcgggaggtgggagccaagatggccgaataggaacagctccggtctacagctcccagcgtgagcgacgcagaagacgggtgatttccgcatttccatctgagataccgggttcatctcactagggagtgccagacagtgggcgcaggccagtgggtgcgtgcaccgtgcgcgagccgaagcagggcgaggcattgcctcacctgggaagcgcaaggggtcagggagttccctttctgagtcaaagaaaggggtgacagacgcacctggaaaatcgggtcactcccacccgaatattgcgcttttcagaccggcttaagaaacggcgcaccacgagactatatcccacacctggctcggagggtcctacgcccacggaatcgcgctgattgctagcacagcagtctgagatcaaactgcaaggcggcagcgaggctgggggaggggagcccgccattgcccaggcttgcttaggtaaacaaagcagccgggaagctcgaactgggtggagcccaccacagctcaaggaggcctgcttgcctctgtaggctccacctctgggggcagggcacagacaaacaaaaagacagcagtaacctctgcagacttaaatgtccctgtctgacagctttgaagagagcagtggttctcccagcacgcagctggagatctgagaacggcagactgcctcctcaagtggtccctgacccctgacccccgagcagcctaactgggaggcacccccagcaggggcacactgacacctcacactgcagggtattccaacagacctgcagctgagggtcctgtctgttagaaggaaaactaacaaacagaaaggacatccacaccgaaaacccatctgtacatcaccatcatcaaagaccaaaagtagataaaaccacaaagatggggaaaaaacagaacagaaaaactggaaactctaaaacgcagagtgcctctcctcctccaaagaacgcagttcctcaccagcaacggaacaaagctggatggagaatgattttgacgagctgagagaagaaggcttcagacgatcaaattactctgagctacgggaggacattcaaaccaaaggcaaagaagttgaaaactttgaaaaaaatttagaagaatgtataactagaataaccaatacagagaagtgcttaaaggagctgatggagctgaaaaccaaggctcgagaactacgtgaagaatgcagaagcctcaggagccgatgcgatcaactggaagaaagggtatcagcaatggaagatgaaatgaatgaaatgaagcgagaagggaagtttagagaaaaacgaataaaaagaaatgagcaaagcctccaagaaatatgggactatgtgaaaagaccaaatctacgtctgattggtgtacctgaaagtgatgcggagaatggaaccaagttggaaaacactctgcaggatattatccaggagaacttccccaatctagcaaggcaggccaacgttcagattcaggaaatacagagaacgccacaaagatactcctcgagaagagcaactccaagacacgtaattgtcagattcaccaaagttgaaatgaaggaaaaaatgttaagggcagccagagagaaaggtcgggttaccctcaaagggaagcccatcagactaacagcggatctctcggcagaaaccctacaagccagaagagagtgggggccaatattcaacattcttaaagaaaagaattttcaacccagaatttcatatccagccaaactaagcttcataagtgaaggagaaataaaatactttacagacaagcaaatgctgagagattttgtcaccaccaggcctgccctaaaagagctcctgaaggaagcactaaacatgcaaaggaacaaccggtaccagccgctgcaaaatcatgccaaaatgtaaagaccatcaagactaggaagaaactgcatcaactaatgagcaaaatcaccagctaacatcataatgacaggatcaaattcacacataacagtattaactttaaatgtaaatggactaaattctgcaattaaaagacacagactggcaagttggataaagagtcaagacccatcagtgtgctgtattcaggaaacccatctcatgtgcagagacacacacaggctcaaaataaaaggatggaggaagatctaccaagcaaatggaaaacaaaaaaaggcaggggttgcaatcctagtctctgataaaacagacgttaaaccaacaaagatcaaaagagacaaagaaggccattacataatggtaaagggatcaattcaacaagaggagctaactatcctaaacatatatgcacccaatacaggagcacccagattcataaagcaagtcctgagtgacctacaaagagacttagactcccacacattaataatgggagactttaacaccccactgtcaacattagacagatcaacgagacagaaagtcaacaaggatacccaggaattgaactcagctctgcaccaagcggacctaatagacatctacagaactctccaccccaaatcaacagaatatacatttttttcagcaccacaccacacctattccaaaattgaccacatagttggaagtaaaactctcctcagcaaatgtaaaagaacagaaattataacaaactatctctccgaccacagtgcaatcaaactagaactcaggattaataatctcactcaaagccgctcaactacatggaaactgaacaacctgctcctgaatgactactgggtacataacgaaatgaaggcagaaataaagatgttctttgaaaccaacgagaacaaagacacaacataccagaatctctgggacgcattcaaagcagtgtgtagagggaaatttatagcactaaatgcccacaagagaaagcaggaaagatccaaaattgacaccctaacatcacaattaaaagaactagaaaagcaagagcaaacacattcaaaagctagcagaaggcaagaaataactaaaatcagagcagaactgaaggaaatagagacacaaaaaacccttcaaaaaaatcaatgaatccaggagctggttttttgaaaggatcaacaaaattgatagaccgctagcaagactaataaagaaaaagaggagaatcaaatagacacgataaaaaatgataaaggggatatcaccaccgatcccacagaaatacaaactaccatcagagaatactacaaaaacctctacacaaataaactagaaaatctagaagaaatggatacattcctcgacacatacactctcccaagactaaaccaggaagaagttgaatctctgaatagaccaataacaggagctgaaattgtggcaataatcaatagtttaccaaccaaaaagagtccaggaccagatggttcacagccgaattctaccagaggtacaaggaggaactggtaccattccttctgaaactattccaatcaatagaaaaagagggaatcctccctaactcattttatgaggccagcatcattctgataccaaagccgggcagagacacaaccaaaaaaagagaattttagaccaatatccttgatgaacattgatgcaaaaatcctcaataaaatactggcaaaccgaatccagcagcacatcaaaaagcttatccaccatgatcaagtgggcttcatccctgggatgcaaggcttggttcaatatacgcaaatcaataaaggtaatccagcatataaacagagccaaagacaaaaaccacatgattatctcaatagatgcagaaaaagcctttgacaaaattcaacaacccttcatgctaaaaactctcaataaattaggtattgatgggacgtatttcaaaataataagagctatctatgacaaacccacagccaatatcatactgaatgggcaaaaactggaagcattccctttgaaaactggcacaagacagggatgccctctctcaccgctcctattcaacatagtgttggaagttctggccagggcaatcaggcaggagaaggaaataaaaggtattcaattaggaaaagaggaagtcaaattgtccctgtttgcagacgacatgattgtttatctagaaaaccccattgtctcagcccaaaatctccttaagctgatacgcaacttcagcaaagtctcaggatacaaaatcaatgtacaaaaatcacaagcattcttatacaccaacaacagacaaacagagagccaaatcatgagtgaactcccattcacaattgcttcaaagagaataaaatacctaggaatccaacttacaagggatgtgaaggacctcttaaaggagaactacaaaccaactgctcaaggaaataaaagaggacacaaacaaatggaagaacattccatgctcatgggtaggaagaatcaatatcgtgaaaatggccatactgcccaaggtaatttacagattcaatgccatccccatcaagctaccaatgactttcttcacagaattggaaaaaactactttaaagttcatatggaaccaaaaaagagcccgcatcgccaagtcaatcctaagccaaaagaacgaagctggaggcatcacactacctgacttcaaactatactacaaggctacagtaaccgaaacagcatggtactggtaccaaaacagagatatagatcaatggaacagaacagagccctcagaaataacgccgcatacctacaactatctgatctttgacaaacctgagaaaaacaagcaatggggaaaggattccctatttaataaatggtgctgggaaaactggctagccatatgtagaaagctgaaactggatcccttccttacaccttatacaaaaatcaattcaagatggattaaagatttaaacgttagacctaaaaccataaaaaccctagaagaaaacctaggcattaccattcaggacataggcgtgggcaaggacttcacgtccaaaacaccaaaagcaatggcaacaaaagccaaaatggacaaatgggatctaattaaactaaagagcttctgcacagcaaaagaaactaccatcagagtgaacaggcaacctacaacatgggagaaaattttcgcaacctactcatctgacaaagggctaatatccagaatctacaatgaactcaaacaaatttacaagaaaaaaacaaacaaccccatcaaaaagtgggcaaaggacatgaacagacacttctcaaaagaagacatttatgcagccaaaaaacacatgaaaaaatgctcaccatcactggccatcagagaaatgcaaatcaaaaccactatgagatatcatctcacaccagttagaatggcgatcattaaaaagtcaggaaacaacaggtgctggagaggatgtggagaaataggaacacttttacactgttggtgggactgtaaactagttcaaccattgtggaagtcagtgtcgcaattcctcagggatctagaactagaaataccatttgacccagccatcccattactgggtatatacccaaaggactataaatcatgctgctataaagacacatgcacacgtatgtttattgcggcattattcacaatagcaaagacttggaaccaacccaaatgtccaacaatgatagactggattaagaaaatgtggcacatatacaccatggaatactatgcagccataaaaaatgatgagttcatgtcctttgtagggacatggatgaaactggaaaccatcattctcagtaaactatcgcaagaacaaaaaaccaaacaccgcatattctcactcataggtgggaattgaacaatggagatcacatggacacaggaaggggaatatcacactctggggactgtggtggggtggggggaggggggagggatagcattgggagatatacctaatgctagatgacgagttagtgggtgcagcgccagcatggcacatgtatacatatgtaactaagctgcacaatgtcacatgtaccctaaaacttaaagtataataaaaaaaaaaaaagatttgaatttgcaaatacaaaaaaaaaaaaaaaaggaaaaaaaaaaaggttgagttcatgtcctttgcagggccatggatgaagctggaggccatcatcctcagcaaactaacataggaccagaaacccaaacactcatgttctcactcataagtgggagctgaacaatgagaacacatggacacagggagggggacatcatacaccagggcctgtccaggggtggggtgaaaggggagggagagcattaggacaaatacctaatgcatgcggagttaaaacctagatgacgggttgatgggtgcagcaaaccaccaaggcacatgtatacctatgtaacaaacctgcatgctcagcacatgtatcccagaacttaaagtaaacaaagaaaaaaaaaaaaagctctgatttggacaccagtgagaatatgaagtccctcggcttgctggattttcttctgtctaggatcgaacctccactgctattactattttctttcctttttgattcttttggatcccatggaaaaatatttatctgcaacttctccacaaaatggaaatttgtttttaatcttatctaacaggagattcgcatatgaccaattcttatcttttaaataaaaatttacttatgtgcctgcctgaaaggactgaagatcatacctctacgctctcttccatgtcctttcttctctctcccctgacacagctgcattggaagtagctgtaaatgggatggactaattttccctacccaggaggcccactgtaaatcaagcggtcacccacttccagctaggcattttgccacaccagggctatgagaaacagatttaattttccaatcagcagttctgtgcatgtctgattcttggctcaacatacaactgctatgctgtttattatacttcatctctccatggcctctgaaactccccaaggctcgggttcgtcatccgcaaaatcgtgggaggctggttccatggttcttgcagtcccttcgctttgaatccttttgtctgtactcttgctacatgggtgttctctgggagtttgttagacatgcagaacctcaggtcccacccagatccagggaatcagaatctgcatgttaatgtgatccccaggtgactctcatgcatgttaccatctgagaagacctaccctccaccacactgaccacagccacgagctgtaccaagacaccaccacacaacagcctcggttatcccttcatgaaagaaaaacaaacataatggctgggcgtggtggctcacgcctgtaaccccagcactttgggaggccgaggtgggtggttcacttgaggtcaggagttcaagaccagcctggccaacatggtgaaacccgtctctactaaaaaaatacaaaaattagccaggcacggtggtgtgtgcctgtaatccccattattcaggaggctgaggcaggagaattgcttgaacccgggaggtggaggctgcagtgagccgagattgtgccaactgcacgccatcctgggcaacagagcaaggctctgtctcacaagccaaaaccaaaaacaaacaacaaacaaaaaaacaattctcaaaaacaaagcaaacaaagcaaggcatgagatgagtgtgagccaagaaacaatactgccaggggaatattgccaaaacaccagagtcatgccttgaagtttcttatcatcagggtcacatttctgaaccagaaagccacaggaaaggaaagactggtcacagacttccttcttccctggaccatttgttacgggaagttctcaggaaacaggtcagtaagtgtagagggcatcacaggacaaacttcattgctgggtttcccagaaaagagcagctctcccctactgaagacacttttagcagacgggccttcactagtgagtaaatatactaaagaagcatggacttacttgtaggtcggtggagcagctgatttgggagagaacccatgagatctttaaggacggtagggatgttctgattagcatatatgctacagccatctgcgatgccaaagccatactgtgatgggactatgccagttatgacaccttcataaccatgagaactgcactcatggccttttcatacccatctgctgatttgataaccacaataatcttccttagtgggatcactactcccactgacagttgaacaaactgacatccatcctgagaagtatacttaaaactagcaagtggcagaactgaaatctgaacccaagtatcccaattcctaatgcaaccttctcactgttccatgaaaagttccattttatagaggacatggctatattacttggattagaaactaatattaaagaagcatatcacgcctgtaatcccagcactttggaatcatgaggtcaggagatcgagagcatcctggctaacatggtgaaaccccatctttactgaaaatacaaaaaaaattagccagatgtggtggtggcactgtagtcccagctactcgggaggctgaggcaggagaatggtgtgaaccccggaggcggagcttgcagtgagccgagatcgcgccactgcactccagtctgggcaacagagtgagactccgtctcaaaaaaaaaaaaaaaaaaaaaaaaaaggaagcataaacccatctatcatcacaagcaccctctttttcatacatttcaaatttttgataggtttgaaaaagaatgaattcgacggtatcttttagaagccaggataaaagagattaaagcagtagtccaaggtcacggagattcctgatggtggagcagggctgaaaagctccctcttctagctaagtgaggcctgcctgtcactttgcttggacagcccattctcaatagcactttcctcccagaacactctcccaagtctttaggtttccctttctcaggatgaatacgatggctacgtgaatggccagaagtttcaccaactctaagtcaaattgtagtgtagcgacctaggcacttcaatggtcaagagagatacagccctgtatgacgcggccacattttccaacttggggaagaatttatacacatattatcacaaagtaaatgctgtaccataaatccagtttttatcttgacctccagaaaattaggtcagttatttttagctacactatcaatcttgaaaatctcccagagttaaaactcagactacatgtctaaatcggggtttatttttgtttaaaaataacagtttcctggccacacatgtttaaatgaagcatgctttgtccccttatggtaacaaactgccctggaagggacacaaacaaagcttcacatcatttgtgaaaatattccttattgctagggacattttcctgaaatatcacttgtctggcttagactgagggtacagaagaagtcccttttcctttaaaacacatttccttttggctttcaaacatcatagatcaaagaacttagacctaccagtggcatcagtcagtaatcaagataaagaccagccaggctccctggcatctaaaagcagattgtagggctcctttttcccgtttacctgtagaacttgtgccaatgtgctgatctgatttccaactacattagggagtcttggtcctgcctgggttgtcaggaacttaaagtagagactaaaaaacaactttatggccaggcgcggtggctcacgcctgtaatcccagcattttgggaggctgaggtgggcggttcacgaggtcaggagatcgacaccatcctggctaacgaggtgaaatcgcgtctctactaaaaatacaaaaattagccgggcatggtgcaggcgcctgtagtcccagctactcaggaggctgaggcaggagaatggtgtgaacctgggaggcggagcttgcagcgagccaagattgtgccactgcactccagcctgggcgacagagcgagactccatctcaaaacaaacaaacaaacaaacaaacaaacaaaaaaaccaagtttatatactacagaaataatctctgaaagatgctgtattaagattacaacacacacacacaaacacacacacacatatcttcttgttttgaggaaacgtacagtgaagtatttaggtgtaaagggccattatgtctgcaacttcctttaaaaatttttaaatatatttttagaacttttctaagtctccaattatactaaaacaaaaagtttagtactgtaggcattgtcagctttaatttatacatatttggatgtcttcctctggttcgatttatagtgaaattacatcatatgcccattaatgtgatacaaactgcatgtcttctacaaacaaaaataaaaatagaagtgaatgtaattttgatgccttttttttttttttaactggagacagagtcttgctctgtcaccaggttggactgcagaggcgtaatctcggctcatggcaacctcggcctcctgagtagctgggattacaggcgcgcatcactacgcccggctagtttttgtatttttagtagagacagggtttcaccatgttggccgggatggtctcgatcttctaaccttgtgatccacccgcctcggcctcccaaagtgctgggattacaggcatgagccactgcacccggcctgatccctcatatcttttaaacataagtcaattatttcatatggtctttaagccaagaaacagctatctcttcactcttcacatgctggaggaaaaactggctgcctggctggttgagagatgtgtactttgatggctgacctgaagacatttcaaggtgattgttacgtgaaattctctcttcaaatctgacttgaagagtctaacctctgcagcatatgttatgacttcactgtgagtcttcttttattaataaaatataatgtttttactaattataagagtaacataaatttcatgccaaaaatgtagaaaaaaggaatgagaattcatttacaattctaacagcagaaataatcaagagtagtggtttttttttaatggttttattcttacagcattattttcgtctctttatcactttactatgcaatttttatgactatgcttaaggagagtaaatttttcgaagttattgaggcaatggagagtctttggaatgaggataattaggcctgaggacacagaggaatcatgaggaagaattctccagtttcattcctttttctgggtacagtttgtttctccttctaagtaagttcctagatatagaatgaattggaaaaaatgaaacgtgaggtttgctacgtctataacagtatcacatttcattttttaaaactgccaatgctttcagtgaggaccagaaagtacagtgagaaaaaaaaattcctcaaatattagttttcatgctcttgcacgcatttttataaaggcaaaagtcattctggtgcctgtatacaatctaaaggcataatctcctggagccttcagtgctggttttggggttttctggagatcaatccacagtgtcccattttttctgctggagctctgaacccactaagagagagcaagaagagatgtaaacctctcctttgcttctgataaagccaagcccttactagtccacatgatgctttctctggggagtgagtcacatacaggagacatggcttgtccagctgcgtgctggactgaatttcagctccaacctgaaccttccaacaggacaagggagggaggagaatgggccgtagcaagacttgcccacagcattgccataacagctgtgcaggctgtgggtacaactctaagagcagcactcattttgtagtttcagtgagtcgtgtccctaaagccgtgtcctgtgtgaccagccccgtctctcaagctcatgagagaagtctatctgaccgggataagaaggatcctggggcgggcccaagcaaatgaatgaattgggaaacagtgccgctcccggcagccagcaaaaactccgccatgctgtgaagaaagtgcattctaattgattcatgttgatacatgctgaattgatggaattttatacttcaaaggatgcaaagaattggttagcaagtctgatgagctcatggtagaaaggatgattttcaacatccatacatagtgaatttcattcaaagagcctaaaaagacttatgcagataattataaggggatcaggcaagtgtgtaatagcacaaattatatatatatatatatgtaaaatcacaacacaggattgggtccttttcccacagacagcacatcatccttgtatatatgatagctcatttgaaatgtttatttatgcagattttaaaaagcacacaaaccctgtaagcacttctgcacagtggcctactcgtgttttctttaacacaaaacttgctttctggtgaacaattctagatatagcaatggttctttctcctctgctttagcttattcacaagcttctttaacttctttaacaacgtgtggggaaaccaagcctggcaacagaaagcacttcacatggggggcttggaaatgaatggaaagcgtctgtcttcaggagagcattcacgatgcacaggagtgagagaagctgaaaagagtcactttaaaagaaataatctgcaaccaagaaaatcaaaccactttatcataaactagtgagcccctccctccctgcctgccttcctttttccaggggagtgctagaaataacttcatcaatttcttttcacttgaagggctcatggttcagaagaaaagatgggcataaaaataattactattacaagtgttatggtagggataccgacagaatgacaaagaaacaagcctgggctttagggatgtgactagtgatattacagtggggccccagggaaagagatcattgtcctagcagatacaagtgcatgtaccgaggcacagaggacaagctgcccaggatctgtgactcttctggctgctgtggtacaagggaagtgaaaagggaagcagcttagccaagaggctttcagtttgtgggatacagagggcagaggaatacactgacctataccatgagtatgcaattagcaaaatcccagcctatgggaattctacgggtcaagtgacctgcgcttcatgaacaggtaaactgtaaaaaaaggatggaggagaagcctggagattataaaagactaaccagacaaagtcagcagtaaaaaatggccaaaagcatagccgataaggatgcacacaagagtgatacagccagaaagatatttcaggaactggcccaaggaaaaacagtgggcattttggtggcggtatttgggatagggcgagatgctatcggggtggaggataaacttctaattcttgacctgagtttaatctacgaaaagagaaaatatgggggagaaaggttctgtttacacatgttgagttgcaatctttcagaatattgggtggagccaatggaaacatggacccagagagctcacttctatgctgaaacagcccacagggaagcatcagaatgaaaatggaaacgttcccaatactagcagaactccacaggcgctttgaaaaaaacatccacattagattccccaaaagggatttatctggtaataaattctgctagacaatgaacagttccacccatgataaaataacatgttgttgctgcaaattctttgtattgtctaattgcagtgcttaacgtaataaaatcaggctggtgttattgttaagaactagagagtgaagcattttttatccaaataaagtgcaatgggttttaaatcaaatcattttagaataagaatcctatgagataataataaaatgcaacttcatcttttcctgccgagaacaaagaagaaaatagtgtaggagatgaaaagtaaagtagacccaacctttttgctaatttgtttttagatacgtactccatgcagacaatggtgaagtgaagtgaagtgaaggggtgtcatcttattcacctagagaaccacaaatcttggtgctggaaagtacgatccattcgacatgatggactatttcccacccggccactcactcgagaatggataacctgttttcccgcctggggtaactgctttccatggatgtacagcttcaggcctcatacgagaggatctcacaacaatctcttcaaactttttctaatccccacactttccagtcttggcacaagacctcatccaggcttctgagtctttgttgaaaatttacacaaaattctagaaatgtattttctttaagatagttactttaaaaatgttattttcatctcagcacagttagcctttccttatctgttcttaaaatgtttcaacttgaaactaaaaaagaaaaaaaaaaacacatttcatctcaaattatgatatactaaataattattgacttggccccaaacatttctactcttttcttcttacacaatcagatttaaaaatgtaactaccttttctaaacatacaatattaaagcatactcaacttcagtaacaggtaatgaatgtacctcaaaagtcagagcctctacgttaagtaccatagtgctccaacatcgttttttacatttttaaaattttattttttattgatacataatagatgtgcatattttcagattatatgagaaaacttaatatattcatataatttggaaagatcaaatcagtataatgggatatccatcacttaaatgtttttcttttctttttgctttgaggaagggtctctctctgtcactcaggctggagtgcagtgatgtgatcatagctcacttgaaccttgaactgctgggctcaagtgatcttctcacctcagcctccagagcagctgggtctacaggcatgcaccatcacacctggctaatttttaaatatttgttttgtagagatggggtctcactatgatgccctggctagtcttgaattgctggggtcaagtgattttcccacctcggccttcccaagtgctgggactataggtgtaagccatcgtgcccagcctgtcttctttacgctagaaactttcaaattaggttctcctagctatttttaaatatacagtagattactgtaaattagtcaccttgctgataattaaatactaggtcttgcttcttctatcaaactgtgtatttgtatccattaatgaacctccctttgtaagtatgatgtaagcaatccttacttggctacactataagcttcaacaacaaattaaaaaatgattcacattatagagcatttatacatgccttttcatcttccaagtgtggtaaacattaattaaccctggctaattaaaacagccacagttgacacatttactcattaatcagcctcaagcaaatgcaaagcattaaactctttcacgttttggtaccaattaaatgttattattttttttttaatgaagaggtcataaatttaagacatgtagttcttagatttaaatttgatagtggttgaaaaaatttgacaatagttcacattcttaaaagtcaaggaaaataaaaacataaccgcattatgggttgaattttcccccaaaatatatgttgaagtcctaatgcctacacctaagaatacagccttacttggaaacagggtctttgcagatataagattgaggtcacaatggagaagggtgggcccttaatcatattagagaagacacagaaacagagacatggggagtaacaccatgtgaagacagaggtggagattggaggggtgcatgtaccaaccaaaggaatatcaagggctggcagcagcactagagcaagcgaaaggcatgaaacagattctcccctagagctgtaagaggcagtgtggccctggcaacaccttgctttaggacttctaacctctagaataatgagataatgagagtatatttctgttggtttcggccatgcggtttgtggtaactggttccagcagccctaggaatctaatacactgcccatgtaagtgaatattagctatttgctgataagacaagaatttctggttataataaatatactggaatagaatgtggtttctttttttttgagatggagtctcgctccagtcaccaggctggaatgcagtagcgtgatctcggctcactgtaacctcttcctcccaggttcaagcaattctcctgcctcagcctcccgagtagctgagactacaggcgcccgcaaccatccccgactaatttttgtatttttagttgagacggggtttcaccatattggccaggctggtcttgaactcctgaccttgtgatccatctgcctcggtctcccaaagtgttgggattacaggcgtgagccacaacacccggccgaatgtggtttcttagtgagtcctttactcaaggctggaattaaacaaaggagatgaatcacgagctctatgataatagtctaatagtctaatctagccctcttaagtgcagagatgttttccctctgaacacccgtgtgtttcagctctgttcctcttccaatgcccttccacagggaacaaatcctttcttgaccaccaatggctgcatgacttatcctgagaagatcatggggattttggatgccaggtcaacccttacactcagcaaggaagtggaagggcctcagtttcaaacactttgtaaacacagaggttaggtcatttcctctccaataagccagaagctgagctgtccctggcagcaaactgtgtgtcaaatgcctggcgggtttcaggttttactaactccagagtgacgaaacatcaccacctctaatgccagaaagaagtcagctgttgtacctgtgtcacaactaaatttactgaagtcagggcagctgaagtaatctataaaacttagcatgtcaatttcaatttagcgttcacattcaacaaattgtgtatttaaaaaaaaatctccagtagtctaaaagttttcattttattcttgtgtaaaatctggaagactggaatagaatgttttatggtatgagtgtttagtagcaacattaggttaactgtgaccttttggctcaagacatgagaaaatatagctaacaatgcttggttatgggtttgtcacactatactttgttatactatccagcagtatccacctgctttaacagtgtggatacactaaaaactaatttaaaaaaatctgggctgggcgcggtggctcacacctgtaatcccaacactttgcgaggccgaggcgagtggattacaaggtcaggaattcgagaccagcccgatcaacatactgaaaccccgtctctactaaaaatacaaaaattagctgggtgtggtggtgcgcgcctataatcccagctactcaggaggctgaggcaggagaatcatttgaaaccgggaggcggaggctgtagtgagccgagatcgtgccactgcattccagcctgggcaacagagtgagactctgtctcaaaaaaaaaaaaaaaaaaaaaacctgtcaaatccctccatacaagtgtatgcacttcacataccaaggaggtctaggatttgaagttcatcaaggccgagtttaggctgccagaccacaacctcgttttaatgccttaggtgcagaaacaggagaaataataccttccatgcctcccctgactagctttaggataaagaagctgtgcactaaatagacagtagctgaggaacgatgaagaggatctacccaaagtatgaataagccaactgctatggatcgaactgtgtgcccctgaaaattcatgtatcaaagccctaaccctcaagggacctttggagatcagacctttaaagagataattaaggttaaatgaggtcatgggggtgtgactctgatccaataggacaggtgtccttataagaaaaggaggaggccgggtgcggggctcacgcctgtaatcccagaactttgggagggcaaggcaggtggatcacctgaggtcgagagttcgagaccagcctgaccaacatggagaaaccctgtctctactaaaaatacaaaattagccaggcatgcctgtaatctcagctactcgggaggctgaggcacgagaatcgcttgaacccaggaggtggaggttgcagtgagccaagatcgtgccattgcactccagcctgggcaacaagagcgaaactctgtctcaacaaaacaaaagaagaagaggaagagacacctctctttctctctgagaaagaccatgtgaggacatgatgcgtaggtggccatttgtaaatcaaggaagagaggcctcctcagaaaccgacctgctggtaccttgatcttggacttccagcctccagaagcatgagaaaaataatttctgttgttgaaggattcagtctgtggtattttggtattttgttatggcagccctagcagactaatgcatttatctagtcacactcagacaaaagaaagagcacaggtcagaatagctttttctagaggattctgttttctttctttcttcggcttctttttctttttttcctgaaggcaatagctgaatctgagagtaacaaggggctcaccagggatgtgcaaggaatttcttgtactgcccctttcatggaaatgacaaggaagtgatttatttcagatgtgactcagttcaggatttgaaagcacatgtgacaaatggtcaagtaaagaaaaagcttttctttttctttacttgaccatttgccacgcaagttcccaagttcttcctccctatcttgcttcattacaggcagtgggaaaaatccaaacagcttccccctgtgtctgggacatctccagctctgtggtgtatttactttgaaggaacaaaaaaggggatagtatatgacttccatcccaagtcactataggatatactttaagaaacaagggagtttaaattgctctgctgtataacctgcaaaattcatctcctactgcagaatagagtgagttgcttctcaggattcgcacctggagttggtattcagcacatgttttctttgtaacatttctgtcaattctctaaaaagaccacactttttgagctggcactaggctctctgacaatcttccaagacgaagcttttacagtccatcatttacaatgctgacaactccaggcacattttgtcaattttccctttcatctcttattaaaataaaataatatcactttggatttgaagagagcctaaatggataattctttaagcagaatgtcagtatcaatgatagaaagggaagaatctaagagggaggtaaatgttctataagtagagaagtaggttcacaatttctgaaacagcaaatcaaacagcaaatgggggaaagttatgaaaggcagaattttgtgactcaagcccatcttatgcttatacagttttttgtttttgtttgttttgagataaggtcgtccctctgtcacccagcctggagtgtagtggtgccgccaggcctcactgcaacctccaactcctgggctcaagtgatcctccaaccacagcctcctgactagctgggattacaggtgtgtacccctaaacccagcttattatttttttgactttttgtagaaacagggtctccccatgttgcccaggctggtcttaaactcctgggctcaaatgatcctcctgcctcagcctcccatagggctaggattacaggtgtgagccaccatgcctggccttttatactgtttattccctttagatacagttaatggacattaataagcagtttatgccaatcccttttcatagctaataagaagtcttatcttggataaataaaacctagccactaatgctgccacacccaaataaactctctatgcatctgaacttcttgaggttaataatgcttcattgtaatattttataaaatcaccactttggaagtgaacaccactagaaattcacatggccagtttatagatggggactgggggaagcagggaggatctctgcaatccagtagttaggctctgccagaatgtatttagagttgtctctaaatacattctgagtctctgcttcattttttttttcaatgaaaatgacaatgtctgtcatcccatgttcaagacaaatataacaagtttctaagaatccttatatttttgttattgcatataagcatgagttttaaaaacctctgaatgtttaaaggatcacctgggggaataagaaaaatgcagatctctgtaggtctgaggtagagcccaagaatctgtatttttaactagaattcctctaaattactgtgcttcacttggccccaattacacattaggagacaatgatttcaggatgacaatcagccttttccatccaaggacttaaagcagctaaaccgaagacaccgacaaataccagatacttttctcagtctactggctgatggcacaaaagtgcagaagtcacgtagggcagtatggaaagctcgagctaggactggagtcagcgagagacgctagcttcccctgttcgtggattccgaagcctcaagcccacattaacaaggccttagacgacagtaaacacccagactcaggctcctacagagggcccccagttctgctctaatatacctatttttctttaaataaaaaacatctgatttttgcaccccaggtatttaaagacacactttgatttctgaaaggcttttgaccacacatgaggaactccttgggccttgaccatttttagcactttcacagtttctgattttgatcaagccacttaatcacccaggattctgaatctgaaaaccaggagggtttaattccactttcatgttcccttgaggagctgttggcagcaggatgaaggcaggtccatacagaacatgggaaggaagccaggaagccagcttttcctttcacatcaaagagatctagaaagcaaaacctgtctcacatttgcatacaatattagacttacatatggatgccatgtctgtcaaaagacaggctaattagggcattagtttctttaatggttgcgatttagtaattcacaaatagtcccacttaatttttcatcctatacctaaaggatctacttcacacttgaagtttaagaaggcttctcccttaagatagaaagaaggcattcaagtatcaaaatactggtttcctgccaaaaaataagggatgagaaaaagcagacacttagcttatcaatcaaaatgctggcagggaaagactactggattaccaagttcattcccctagcctgcactgattcctctttttctctaaagtttcttattttttcagtttttctcatgatactgacattgccaaccagcagtctggaaactgttcaggttgattcttagcagaaaatcgaggggctctcctgttactgttaatatccttaaaacacttaaatttggttagtttgcttcaagcattctcagtatattacaaaaaaaaaaagtactcaagaatttctagactttattttgactgacatcagctaccctaatgaacaggaggggacaacagcaaggtatattaggagcatctccttcctttttaatcagaattatataggaattaagaactctaaggccacagtagagtatagtatcttggaagaagaaagcggagaatgtctgacattttcactgatcgtttaggctgatggcttaaaccatttccacccaagtttcttacaagttagcatttccagccaacattacctactgcaatttctctataatcttaagggtattgagcccccaaatgagagagagaaaagagatgtaaactaaacaggagtcagagaaggggaaactgagtctgttgcacatcatttaccctttaacatgattttaaaggtaataatgcttataaaaatattagtagtagtaagggatatcaggtgacaagcagaagtgcccctctccacagatatgccagtgtatctgtagaaatacggtgctaaaattagaaaagactgaacattttaatttattaggtagacccaaatagtctaaaaggtttcacccatatacttagcaatagtttatgaaagttccttttcacctatccttatcatgacaaggcataacagatttttaaaaaactaccaattggccataatttttaaaaaattacattttcattgggtattaataataagaagttgttcaccttttaatctacaactaattatcagatatgcatgcattttttttctatgaattgcagctgttaaatttttgtgaattaatccaatgcatcaattcctttgggttttcaccttaaacatttttgtggcatacaatttgtataatgtgaatttagaagataatagcataggtgactggggtgctacaatggattctcacctatttattaactttttaatgagttgattagtctctaaatcagtaattcgcaaagtttagcatttatcaatgtcacctggacagcttgataaaatacagattgctcagccccatccctagctttgctgattcaggaggtcaggggtgggatcatggaatgtgcttttccaacaagttcccaggtgatgccaggcgatgctgatgttgctagactaaggaccacacttggagaaccacagctctgaaatattccctgggcatggtatttgcaatacatactttatacctaataatttgtttcaggacacacaaatgcacatgagatttgatacatactctcaaaaagctaacaatcagttaagtggtaattcactgacatgtacacatcaaagtaatgttagacacatgtaataggccaagattggggatgggcattataggcagatggaataacataaataaatgcatccagggctatggatataagatcagcctggctggcaaagtcagactcatgaaggagattaatgggaaaacctatctgttttgtctgtctcaggttattttgaggatcaagtgaaacttagaaacaataacaacaaaaaaagcaaagtctgtgatcaagaagaattactctgttgcaacaatataaactaagaaaaaaatacgcaaaattctctgctgccttgggagatgatctcatgatgtgtatcatttacttttaatatttttatttatttatttttgagacggagtctcgctctgtcgcccaggctggagtgcagtggcgtgatctcggctcactgcaaccttcgcctcccgggctcaagtgattctcctgcttcagcctcctgagtagctgggattataggcatgtgccgccatgcctgcctagttttttatttttagtagagatggggtttcaccatgttggtcaggctgctctcaaactcctgaccttgtgatctgtgcgcctcagcctcccaaagtgctgggattactggtgtgaccgaccgtgcctggccaatgtgtatgatttaatagccagcagcaacaggccactaacatgccatctgctaacaggggctctagctattaacatcaacagagctaaaaactcttatgtctgatcccttgcaaatggcgaagacctggctgagaattattatctcatgctttcagagaaaactttgcttgtcctgcactgaaaaatctggctgcaataatcacatggaagaaggtatgtttgttggcatggttcatgggctggcttatgacttctaagcagaagatacaaaataatataaaattcctgcaacatgcacaatgtagctgatattcatgttctctttaaatatcttaacactgacttacatatttaagggtgtggagtctttgagcttgggaagcatcttattactgaggtacaaatgctaaaagagggacatttcttctatctaccgcattttcaatgaaaagatgctgaaggtgaataaacagctctgcaaacccagttttgtttaacttggcaacagcagtaagtaagtatcactggacacagagacactggaatagattcagtctttagtcttattcatcacgtctgaccttgggcatattacatggttttcctgagcctatgaaatcatgcggctgaacgagctgaaaactaagattctttcctttgctaataaatttcagcaaacgataggagtaagaacggctgtctaacgagactaccaaatgctacgagacgcagcaagcaatgtccctttacctaatggatacagcttcttaactgtttatccaaagtctccccaagcaaattctaaattattctaaattatttgagtaacaaagattgggcccttatacctgtgacgtgtctggcaatgacaaagaatgtggaacatgggaagcatttaatacatatttattgaagatcctgtgtccttatttcttcaatctccttgctattcacaatggcgaatgatatgaatatacatatatatatcctatcatggtaaatatatataacataaatcttactgttttaaccattttaagtgtaacgctcagggtattaagtatatttcacgatgctgtgcaatgtgatggacgatgcatcacggccatccatcttccccactgaactattttcaatattgccaaattgaacctctgtgccctttaaacactaactccacagtccctcatcctctcagcccctggcaatcagcattctactttctgtatctatgaatttactaccctaggtacctcatgtaagtaaagttccatataaaacactttacaaaatttgcatgtcatccttgtgcaggggccaggttaatctctttaatcattctaattttagtatatgtgctgctaaagcaagcatcatatatatacttctttttttttgagatggagtttcgctcttgttgcccaggctggactgcaatggcgcgatctcagctcaccacaacctctgcctcccaggttcaagcaattctcctgcctcagcctcctaagtagctgggattacaggcatgcaccaccacgcctggataattttgtatttttagtagagacggggtttctccatgttgaggctgatctcgaactcctgacctcaggtgatctgcccacctcggcctcccaaagtgctgggattacaggcgtgagcaccgcacccagcttttttttttttttctcttttgagatggagtctcgttctgttgccctggctagggtgaagtggcaggatctcagctcactacagcctctgcctcctaggttcaattctccaacctcagcctcccgagtagctgggattacaggcatgtgccaccatgcccggctaatttttttatttttagtagagacagggttttgccatgttggccaggctggtctcgaactcctgcctgactcggcctcccaaagtgctgggattacaggcgtgagccactgtgcccagtctatcacatatacacttgtgaaaacttctaagacttccttacaaataaaagtggtgactgagaactaagccatatacctagtgatatctcagtggtgatgataaagttagtttttatttgacaaaatctatttgctatcagaatactatacttaaaaatcataagctttaacaattaaatcgcatgtataaaaattttagagaacatgcagctatagcaacttcaatgctatacaggaagctgaagacataggtccacacctcagtatctgccctcaggggatgggcagacaaatttcaatgcccccccccaaccaaaagcaaagacacaaaaggcatgtacaagacaatacaagttgttgccaagcactgtttcaaagaaataagatttaactcatgcttttaggagcatatgtaaatacataataattatcaaaagacaaacacattaaacaggcttttttaaacgcactatctgaagtcaatgaatccatcaacaggagctgaaattaagtaacgccctggccttgaccctctgaccccgtttcatgctcgaagtccaaagcctcttcacaaatagtgtttaggtgcacaccaagtcaacattcctttggacacgtctcataacttggaaccggttaatagatggatccactatttttgatgagatattataactaaccttctatgatttactttctaaagcagcccatagtgcatacggcaggaaaactgttaactaataatggcacttactcagaaaatacatgcaaaatttgtttctgagttgaacaccaacaagcaaattaacatgtcttccaaactccgtctcacatgaaacaaactcatgtcattcccagttagtgtttgtggaaacatatttcaaaattaatctcaaaattcgggaaacatatttcaaaattaatctcaatttggattcatctccatactcagggtggcaaacatcactgatttttttcccctcctcttttaaaaaatgaaccttgaaggcagatgcttgtgaaaaacagaataaccagcccttgttccagtctaaaatcattggttgttcccaagactctacaaaaaaagcaggacacatctgctctagtgttccatgccaggaagtagttccacagccaccactgtggtctgacttcacttcccaatcattttaatttggatttctttttagattttgtttcaaattacagggccatacaaacgagctggtgagttgagaaaatagctttggaactgcattggatcatcaaaagaaacggcagactttggcgtgggagaccatgcctcaggctccatccatttggttgaggtgcccacacatgcacaaaaataaaagaatggcataaaaacagacaaaaactactgacatgtcagtcatcatggcttaaggaaaagctcacaaataatttctctggaatctcaccaaaatttggagtaaaagatgatagcatgctaaatcagttctcttgctacttctaaaatactaacgttcctgaatggggctcaaggtggaatcatttcgaggcaaatatcagttctagtagataaaagtgttgtttaaaacctcattaacattatatataaatattccccaaaatgatctacagatccaatgcaatccgcacttttttttttttttttttttttgcagaaatggtagtgggggcagggggtgaggaagatcttaaaattcatgttgtaatgcaagagactccggatactcaaagtaatattgaaaaagaagaacaaagataacggactcacacttgctgatttcaaaatttactacaaagctacaataatcaaaacagtgtggtactacagtaagcacaggcacacagatcaaagaaaagaactaagaattaagaaataaacccatattatctatggacaattgattttgtgtaatagtgccaagaccattcaatgggggaaataatagtctttttcttcctttttttgagacagggtcttgctctattgcccaggtggcgtgatcaaggctcactgcagcctcagccaccccaggctcaggagatcctcccaccacagcctcctgagtagctgggactacaaatagatgttatcatgcctggataatttttttgtagaaatgtggtcttgccatgtttcccattctggtcttgaacttctgggctcaagtcatctgcccaccttggcctcccaaaatgctggaattacaggcatgagccactgcacctggcaagaatagtctttttcaacaaatggtgctgggacactggatatttatatgcaaaagaataaagtcaaacctctacctcacaccatatatgaaaattaaaatgaatcaaagatttaactgtaagagctaaaactacaaaactcttagaaggtaacaggtataaatcgttgtaaccttgtttcggacaatggtttcctagataccataccatagtaactgccacaaaagaaaaaactgataaaatagacttctaaattgaaaatttttgtgtgtcaaaaggatcctattaaggaagtgaaaatacaacctacagaatgggtaaaatatttccaaataatgtatttgataagaatttaatagtatccagaatatataaaaattcttacaactcaataataacagcaggccgagtgcagtggctcacgcctgtaatcctagcactttggaaggccgaggtgggcaggttgcctgagctcaggagtttgagaccagcctgggaaacatggtaaaaccctgtctctactaaaaatacaaaaattagctggatgtggtggcatgtgcctgtaatcccaactactggggaggctgaggcacgagaatcgcttgaatccgtaaggcggaggttgcagtgaactgagatcatgccgcttcacttcagcccgggtgacagagcgggactctgtctccaaaaataaaaataaaaataaaaataaaaataaaattaagaaagtaaggtaaacaacccaattaaaaaattgggcaaagaatctgaacgtacatcatttatttgaactgaacaaaataatccataacaaaccattgcaatcgcatgaagaaaacactgtggttgatatttaattcctcaaatttctgccagcgtccatttggagcacaataaacaagatcaatatactgcactgaattatacatattaaggtcaacaatttgtctgccagaatggtagagagcgcaatatttttttaaaaaaggaaactttttttacattcattattcctagaaagtgtattctttttaatgtagctaaaaggatttactttttcctaaaattatggagtagaaatacataaaagaaagtatctgtttgccaatggtaaaactataaaaatcattcaggaaaacggatgctgtattacatgtgaatttttaaaggtcattatcaatgacttccacagatcatctggatgacatatgcactatatttacagattccataattaagctccaaagcaagaaaaagagagcttacctaatatcacaaccaaaaaaggcatagagagctaaacgtatacaaagcactctactaaccaccactatggggtgagttcgacacctgcaggtctgtaacctcaagtctgcagacagaccagttggggacctaaggtatgaagtgtactggcattcacacatttgtatcttgctgtgtggagacatttcaacatggcagtccaaatgtcagaaaactaggaggctgtcttaatagtataccgtactttgccattcatttgacaaagcattttcatttataaatgagtggttctattttgaaagagaaattgtcttgggtcaaagatatacatttagacacaggcagctaaacttacaggcctcatgtctgttacttaataacactagggaaaatatgaataaggagctctgagactattatgaaaccaatgggggaacaaggctttggttgttgataatatgtataaatgttcttggccagatgtgggggctcacgcctgtattcccagcattttggggggccaagatgggcagaccacctgagatcaggagttcgagaccagcttggccaacatggtgaaaccctgtctctactaaaaatacaaaaaaattagccaggtgtggtggcacacgtctgtagtctcagctacttgggaggctgaggcaggagaatcacttgaacccgggaggcggaggttgcagtgagccgagatcacgccactgcactccagcctgggtgactgagcaagactccatctcaaaaaaaaaaaaaaaaaaaaagttcttatgtccaaatacttaagtcagctgtaaaccattaaatctatatacatttaaaagtcatttcttatgaaaaacaaagtcacacctatgttcttataagaacaaagtgacagctctctatttgctgttatgattttttttttttgatgttcatccttgactaacaattacacataaggatacttgaaattctcaataacattaaatttctattttgttgggctgggaagtgctataaatattctattttaaacctagtctactttggacccactaaacccccaaatcaacaggcttattagaaacagaatatggaaacactgtctttgaaataaccatgctgcatttttcctgaagagtggaacattttatcaagaggccacagtaaaattgtaataaaaaataagcatcctttcattattgcgaatttcttgattccccgccatatctttcaatcctgccccattcactatggatttattcagccagagatctttcccgcatctggtttataataattcatgtttttattaattttgaatgctagaagaaaaaaaatgggtatgaaacaattatgcctttgttccctctttatttcctactgcctttctcataaattggttattatagcattctgtaaaacagccatctctgaaaagagctacatttttagccttgaggtagctgcaaagagaagcacactttgataaataacctcagtgccaatacaaagagtagaatagaatccttttagcagagatttaaggaagattacaaaggacaaagaaaacaccatcatttttaagtaacaatttgacaaagcaaaggttgaaaggatgaagggattctgcccttttgaaggattaataaataattaaagcagaatatgaacactgaagaggagccatagtttcactgaaataatgattccatcgtttgttgaatgaaaaaatattaatgaagacctacatagtgatttaaaagaggagattttatctctatacaaacaatgcctgaggccattctttgcaagaaatcttcataatctgcctgaaaataactttttaaaaaataaaaacattaataaatgactgagcctgggaacttgcacataataattaaaattgaatgaaaaaaatatgaaattataaaataaaacacgggccttttataacacaacaggacacttgaaaattcacacttatttgtcatgggaatagcttcagactgtggttggcggtcaaacaggacagcacaattaaatcaagtagatgaccaaatagcagagggtcatggtacaaagaaggaccatgttgtaaaattttattaataaaggtcctcagaaccctgatttatgctttgttatcttggccaaccacatccatttagttagcttgatcaatcacagctttagaggatgctgtggcctaggaaagaaatttgttttgtgtggtgcttacgctagatgtcaaggaaggagttttggtcaggtctttagggttacggaggagcccacttcatcagtccaagttaaggagcatctgcctttttatcctggggactggcttcaaccttatatttataattactaatatctaaaaagtaccagggtccttgctggatcttgaggaggcaaggatgaccaacatatatctggaagagttcacaggatggagggttagtagagatataaacaaataatttactccaagttagagtatggtattggaggtggatacccagtgctttcacattgaggttaagtaggggaaaattccacttcagagaggaaaataggcagcagaaagaacacagattttggacttctggcaggtcttggcttccaccccactttcatcactttactatctgggctgggcaagttggcaaactctcttaggttcaaagttcaatttcttcaactgtaaactggggatgctatcactgaatttccgagtatcttcactagcccatatgctgcctttgtgtgaaatgcaagaacagcccacttccagtgggtgtgcacaatgccagagggcttggctccttgagtgggatgtagaataaaattatcagtctccactcttaccctaaaccacctgccactgccacatctctatatggcggtcctgtacctcaacggggaacattcataaagaaagaatgtgaccatcagcattatcacaaagaggcactcattagttggttacatggttgtcactcaaatgccagctcttttctccgttctctatgcaaattagaaagggtttataggacttgggcattttacttgaatcttgaaaggtgcaacttttcaagcaaggaaaaaccacaagcagctttttttttttctttttttttttttttggagacggagttttgctcttgacgcccaggctggagtgcaatagtgcaatcttggctcactgcaacctctgcctcccgagttcaagtgattctcctgcctcagcctcctgagtaactgggaattacaggtgcctgccaccatgcctggctaatctttctatttttagtagagatggggtttcaccatgttggccacgctggtcttgaactcctgacctcaggtgatccactgccgccggcctgcagctgttttttttgttttgtcttttgtttttaagggaacttgcatagttccgaaaaggaggaattgaagtgggagggggccaatgtgagataagaggtagggtgactggctgggagtctaatgacactgatgagaggacaggatctcaggtaagtaggggatgtgcagagatttcacatgaacacagaaggccaaatatacagaacttgcaactaataagaaataatgggtgagggagaggaaggcatcatggatagtttaggccaaccaagagaactcagaatagagtgtgtaaaacaagtaaatttccagaaggacatgagtgttatacacattgattgcaggttcagaggcacatgggatatttggggtctggaatatggcactgggattcagtacgctggctgtggctagacccatgaatttgggattcactgaagttagtgggaaagtagcatgaacagacaggatgcctcagggaagcacaatggaagatacaaggccagggccagaactcacaagcatgatgaaccctatgctctggtcacagtttactgctcacaaatttaatgtcaattttccccttcaccgatagcattccttcttctcagcatgactccattcttcctcattttcacccataaaagagaattctaattggaagcataatttactgaagcagatatacctctcccactaaagatactggcagttccccagactggtgaaaacctcttatccataaagcaactgttaccattatttaattaaaccattgtatctctctacagatgtttgactgcattaagcacatcctaattgcttgtatttataagcacaaacttctatacaaaaggcatgcatttttagggactttaaaattttctccttttgccagtgtctctgaattttagtatgctatttgtactgaactgactccaaatctaaaatttgattatatacagaaatagcaaataaatgcaactcagactaatgacaaagcatttaatcagagaatattagaacgactacaagacataacctggaaaaaaaatctatgaagaacctatttagaaagtaagctaaaagcaacactttttattatgagaaattttaaacacatacaaaagtaaaaagaataacatgaggaacctctaataacatttggcttaagcaattagcacccctggccaatcttgaagtttcaactatattcctactaaaaagggacgtattgttttaaatgttccttcaaatgaaaaaggactatagatgacaactaggttcaacccagaaaagctattctccccagcaaaccacttctgtagctttgacactagcagctcagatagtgtacagggttcgttattgcaaacttctctttctatagagaacagtcatttaaaaatggaagcacccaggattccaaatgaaaggtttttaaaaaagattatctttcagaatgtggcatctggtatatttagaatgatatatatgtcattacttaaaaaaacccaactaatgggtggattgagagcatattacatacatacacacacacacacacacacacacacacacacacattaagagcacatacgtaatatgttctttatttttattatactttaagtttgagggtacatgtgcacaacgtgcaggtctgttacatatgtatacatgtgccatgttggtgtgctgcaccccctaatatgttcttaatccaacctaatggctgtttttttttttctttttacagaaaaagattccatgatactagttatctaaatatcctccctggtactgagatttgaagtttattgtgctgccctattcttgggcatttcgtaatattcaagatatctgaaccaccatctgttctgtggaagtgtgactaattagtggctaatgttttcagtagtatagtgccaaataaaaagttctaataatttaattataaagagtcaacaataattgctgggtgagggtggaatattggtcatcaactttttagtcctttgtaatggcttatttccctatagttattacctatgccacttcaactgaagtcacatgtgaaaacaggcttaagatagctgtaaaaaacaaacaaacaaacaaacaaaccatgttttctagaagattttagcttcagttcattaagactgataaattatttcattttgtaccttctacaactttttggagaacttctttacacttatttaatacatagtattttaaaggttccttactgatgtctattctccaagtatacctgaaaagtatatttgtttgctaaagaaacttgatacagtgaaaaattaattggagatctctgttctcaattcatggtgtagactaaaaactccacctccactatcttcataaattcttgctcaacactgagttgctccttctgaacaaaagcttggcacactatgaagttgctttttttctcttcttttttaaattagagagggggtttcaccatgttggccaggctggtttcgaactcctggcctcaggtgatctgctcaccttggcctcccaaagttctgggacactgcacctccctgacatatgaagtttcttctgcaagttatgtagctcaaagtataatttcagattccgtccattaatgtgcagtactgaacagaacatcatcacttgacacatgccaaatatttcacagcaatacaaacaatatttacaaggccacataaatcaggaaagaatgagcagaataacactggcataaaatgggaaaaagtgagggccagctgttcccttgagcggtgtttcaggcacttcaaagtcggacttactgtaatgggtacatccatctacaacatcctgggtgctctgattccagatgataacctgtatctatttccaacccaattaacaaagggtaggattctttatggggaaggatatgccagatacatattgcttatatgttggtagactacacactaaatctccagtataggtacatatgcttatattgaaagatgcaccaacataatcgtcatctatgtacctttgtgaagtaagttaaacagttatgggcattttggcagctgacagagactcatgtggtatttgattctctttccaagagaaacagaaatgagagatcttaaatgaaatcattagtcattaggaaaactagggacataaaagacagtgggcacacaaggtcagtttcctggttttgataatggactatagttacgtaagatgtcactggtgaggcatgtgggtgatggatgcatgagacctctctgtactatttttccaagttcttgtgagagtacaattatttcagaatataagtttaatagcccactatcttttaagtttaaacaatgatgtggttcagagaacactcatggcttccctgctcagccatcaaagagaattgtgacttactgaatataacaataacctcaaagtcacaagtcacagttatgtgttttggctgtgctacttataatgcatgtgacacaggccagtaagttactcaaattttaagtttgagctttttcatttgtaagatggaacaatcgtgacactcaaaagatgaagaatgagtttttttccccattaattgtaaagtaccaaagcatcataatttgagagccataacaagattgggcaaattagaaaaaatgctgccacgtataattcaataacaagtgtccaattattacaaaactataccctaagtcaggcgacattcctccagtcttacaagtatggagaggtaagaactgattcaattgctaaggctagtaagctagttccagcctgacagtttcatcgtaaaaggcaagctgttctattaacttccatattcctcaaacagataactcacttcctcaattttcctctgggggaaaatacatgtccatgtgcagcatcaaaagaacagcttacttaccaacttcatcctgaatctcctcggccactgcaggcacgttgtagagcagggagagagactgattcatgcgctcataaatcacacggaggtgtgtcataacctgcatcaaaggatgacaactccaggtcaacaatgtctgggggtaggaatggttctttttctttctttttttcttttttttttgagacggagtctcgctctgtcgcccaggttatttttcttaccaagcactgcaggtagatacaaacttccaaaagaaaactgacaaaacactgctactgttaaaaaggttgaactgaaagggcaactttatttttcttgttctcctatttctgttctctaactttttgagctcaggtttaagacttgatcttgaaacttaccattatcttgtatgcttataacagccaattaaaaaggctacctctgccacctctgattcctaatactgaggctctcttaacaggaccctcatgcctaaatacatttctttgcaaatttccccctagaaaacaacgtatttcaatttgattggctatttcatgctatatatatttaactctttcattcaagaaaatgtaaaatttcacatttcctaaggtagatcccagttttcagcctttgggaaccggggagtataaaatacattattactgggcttcatttaggctcacatgaaatctcaacattccagtaggtttatgattgcctgccatacttcagttgaaccagttttcaagattttagtttatacaacttttgtttttctcattttagtcattggttttaatcagttccttagcaatcagttagcagtagactaagatttttacatttgttattttcataactcagaaaatgccaaaccacatattgctctaagacaagcttttagaatttaccagaagttaaagagctcttgccatagggaaaacacctataggtgctcggagaatgcgtgggatcctgtcaccaacccaagaagcaagaatcctggattgtcaaagctgcagaagatgattataccccacgcttacctgggaccggatctgagcggctttcttgggatccaccatgcgcacatgctcgaaatgctttagggtgtgctgtctgtccttctgttctgcgcggacatacttctttagcatattgaacacgtgacgaggctgtgggaggaaaatgaaaaactctttttcaagtttgtgcaaaacactgcttcttccattggcgatgggttagaggttccactaatgcatccggtcatgtgaacgtactgtgagtcacctttttgcaggtctgccttctaaacatttctcctactcctttcttaatgggtaattacttagatcggctgcttttcacttccacaagagcatttaacattctcgacatatatgatgactgtcctccttactcaacattttctttttaaataggagtactctgctatagaaagagaacagatttgaggtctgtcaggttaagttaggtccttctcttttcgcacccaaggggcatatgtgagactacattgctacgtgtacattttgaagaccagaggtaatgtcacacagataatcccatcaccagtaacatgtaacatacgaaatcaaaatgagaaaaacaggaaatttaaccactattttgtaagccaaggagtaactgaactgtaagagacattatatttttctaggagaaaggccattgctaaactgtatttattttactctgaaatttaattaagttctttctaagctatcagattctaattctttcagcaacaattacatttcgtcttaagtgctcctattttctttctaattggttccatttcatttttattttagttttacctgaaaacatccatcctaataaaaactaaggacaaagattccctggtcttcaacaatttcatcactatatgcattccactacatgattttgtaagatgatttccaaaaacacaacatttcttcttcattaaaacaaacaaacaaaaaaaccagttgtgaaaattcatgttgggaatagaattttggtcatttgggcaaacctagctattattaacccatgtgtcatgagtaccctgaaaaccagttggaaggtacaaaatttattccagagatggtgtgtgtggtggtggggcgggtggtaatggagcttttgttgtgttatccatatcctatgggatgtgcctctccttccccttttgcttagttaacttaggagccatctccctgccatctcaggtggaacgaggtaccctttttctgtgctcctatgaaatactgtgcaaatccccattaatgtacctaactcattaaattatctatgattcttactcccctctttaatgtgagatccacagggctggatttggtcttttttctttatttggaaccccaataacacagtgcttgacccagagggtgctctgtatttgcttggtgaatgcctgccacagaggccatgctactgtacttgagaaaacaaatacatatacacaataaaaataaaacaacttgggctcatctgccttcttttttcctaaaagaaatgtgcttctctataatccccagaaagacagccatcacagcttgcaacagttcttggcaacttattacaactctcatctgaactgtgaaatctggttgaatttacaaatcagaggatgaccttttaaatctcagaagaaaagtagtaaaagaggtaatgactgataagctatatctctatatattgaaaagaggataggttatacatgtgaattaaaaaaaaagaacatttgaaaacatcagagattaaaggctgactcttgttgattgtgaaggatatttgatatgcagagttgtgtgatcaggatcttgcacaaccaccctcgatgcttgcttgttattaagcaccaaggtcttagaaatctctctagttctgttaccattattcatccaagactggagacagaaggggctgtgactaatcgcatttaaccatgatgttccttcctggccttcatggatgctttcttagttgctctatttcatttttctcccttgtaaaggatttattgttttgaagaaaatgggatgaatttttaagagtttaaataagaaaaaaaaaaagcacttcaattaaaaaagtaaggattgctttgggagtctgaggcaggaggatcacttgcagccaagagtttgagaccagcctggacaacattacaagaacctgtctctacaagaaaattttaaaaattagctaggtgcagtgacacatgcctgcagttccagctacttgggaagcttggtcaggaggattatttgaacccaggaggttgaggctgtagtgagccctgattgcacgactgtactcaagcctgggaaagagaataactgcctgtcttttaattaaaaaaaacaaaaaacaaaaaacaaaaacagtaagaattgcttttcatcataacttctttttttccagttagtcatctatgaatgtttttgtaagatattttgtcctaaaaggactgtcaccaacaagcaggtacaccaggatgccatggccccaggctggccttggcattactacttcaagctaaatttcaatttagagaagatgcaggtcatttctgatgaccaacatctggatctccccttttcttctcctatcacaacaaacagcatatattcccactaattattattattattattctttgagatggaatctcgccctgtctcccaggctggagtgcagtggcgtgatcttggctcactgcaacctccgcctcctgggttcaagtgattctcctgcctcagtctcctgagtagctgggactacaggcacgtgccaccatgctcagctaatttttttgtatttttagtagagacggggtttcgccatgttagccaggatggtctccatctcctgacctcgtgatctgcccgccttggcctcccaaagtgctaggattacaggcgtgcgaccagtgcacggccaattaattattcatgttaacatacatttaaaaataagcacaaaagccttgacttttcccacctatgcaattcagatggcagtatctttcagatagtatttgcagattaaatgtgttcagtgatagttacccagaatgatgcgtagtccattgctgatactcaatacacatttatttctttcactcaggccttatctataaatcatcgacccctttctttcctctaagtaataagagttcaatgtgtattgactgcttctgaatgagacagtatattaaatgctttttgctggtaactcatcaaatcttcgtctcagccctatgacagagtcatagcagctctccccaccttattggtgaggcatgaagcacaaaggagattgtggttacataggctacatccctggcccaatggttacacagctagttagtgttagatttgaagaatgggttagtctcactgtcttggctccagagcctccttctcctaatcactttgtgatctggcccttcaaggagaatctaaaatagaccaagtttaagatagttctacaaagcaacttacgaagttaaaaacaggccaggcgccgtggctcacgcctgtaatcccagcactttgggaggccgaggcgggcaggtcacgaggtcaggagttccagaccagcctggccaacatggtgaaaccccatctctactaaaaatacaaaaattagcaaggcatggtggtgggcgcctgtagtcccagctactcgggaggctgaggcaggagaattgtttgaacctgggaggcggagcttgcagtgacctgagattccaccactgcactacagcctgggcgacaggacgagactccgtctcaaaaacaaacaaacaaaaacaaagttaaaaacaaagaaataagtgcatggttagaaaagacagtctgttccaggagtacttgcctgactttctagtttttacaagtgcaggtaatattctgtgggccatgctaacatcagctcctttaattgtgcagaaggttcagatttagcttgttcagtctctcaattactgtcctaggtttctggagttccattattccttagctaatgcatgaaattatttagctaattattaagctaatgtgtggggagaagaaagagcaagataggaatgtcctctatccatgtggataaaggattaggattactggaaagtgattcaaggtattaaagttaggcttttgtgacattcatggtttctagtgctaaattcatccttatcttctattgagatgggtaattaaatggtgaatgtattcacatgttttcaattgctgatctcatttaatactgccattctccttcaaaatatattcctaacttatcctgaaaatccccagagtttgataataatgttcccggactgaactgagggttgggctactatacctcacagcccaataacgagatgcagatgaactgggaggaagagagtttttatttttgtaaccttttacagggagatggcctggaaattagtgccagaccaactcaaaattacaaagtttccagaacttatatgccttctaagctgtatgtctacgtgtaagtgtgcattcatctcatgacagaagtgattaacttctttaatccataactaaggtctgagtcctgaagaccttcctctggagtctcagtaaatttacttaatctaaatgggtctaggtgctggggtgattactcttatcttgtctcctgctaaatcagggaggtttgaggagttcctgcagacctccagtaaacttgttcttggaggcctgtagagtttcttcagactcccagtaaaacttgttaatcctaaatgggtcctgttaagaattccttggttttgccaggaaaggcctaggcaaaactcttggtgggcttttgttacattccagcctctgtataagggcgctggcttttttttagcttttagtatttaactgaaccactcagtcagtacggaaacagctgttacggaggcctgcattagtgagatttggcctgccacaataacagagtagcaaaggaggctctgaggactccccaggcctcagctcctccagggataatgagacctgggaaaccccttcactgtttatgtaagctgagatgcgcattttgtgtgcatctacataaacacaagccttttcttcctaatgcctattggataagcaaagcctgggaacatcagataattcaggaagaccttaggatatctcccaataaatgaatttgcagggttctgcttcattgatttggccacctaaacacatctctaggaatcatgcttggaaatgaaaacaaaatcagattaccttctttgttggacggtaggcaaataaatcataccaaataaaatggtagttatctctatccctcagaaacaaatactatttttagttaagaaagaaaaaacacaggtgtaaaaagaaaataattcttggggcccccaaatcactaagctaaagggaaaagtctagctgggaactgcttagagccaatcaccctgattgtctaccctggagaggctaatcagaaactcaaaagaatgcaactgttcatctcacctatctctgacctagaaggcccctccccacttcgagtcttcctgctttttgtttcaagctgtctcgcctttccagaccaaaccaatgtacttcttatatgtattgactgatgcctcatgtctccctaaaaatgcataacactaagctgtgccccaaccactttgggcacatgtcatcaggacttcctgaggccgtgtcacaggtgcatcctcaaccagggcaaaataaactttctaaattaactgagacctgtctcagatttgctgggttcacatagataacagttccctatacttttatatttttgttgaggttaaaaaaaagacctccctccttttgatatatgattcctgcatatttcactcaaataaataaataattgccctcacaacttttggccaaaatacaaatcctccaggcttaacatttgttatttcttgagctataataatgtatctaagaataacaaggtgtcctgattgtctagtgaggtttattttattatgctaagacaaagatgaatttcttaaaattttaattaaaaacacagaaaccttcatacaggaatggtagggaaaaacccctctgttatctctatagaaacatattctcttaaagtaattgctattactattgtcacaatattcatacttaagacgggttattcatatgatcagaaaaacaaaagaattcagtggctcacgaaaaggatattgataaagagagtttaagaaacattttttttttttaacctgcaggcatataatccggatcaccctcatgtctttaaatcttctgttactagcaataatttttctgtgtattaatactacagtctggttatattggcattagatggctaatctcattattaaaatatatggcaaagaacagaggaagagatctgtcccaggaggactaattataccgaatcctatttattgtcactactgtttctgaaacagtgtttagctcataattatgtgctgtctgtttgcaactgatgtgacattttttaatttgtactaaactcacctcacaatcacactgccttttaaaaaatcattcaaaataatttattaaaggattaagaacaggcaccaccgaaatggcttagacatcatttacagcaagaggaaagagaaacataagatttacattttagaacattactcattttcctctctggaaacaagagcgtaatgtatttctacctctaggcacagttcctgccacaatttggttgctaataaatatttgttaattaaattaatgagtaacttgcagctagatacaatttcagaaataggcccagtagtgcagaatatccttcatagtcttcaagtagaaaacaaacacctctctactcagaatagtggccttcccaattttcaccgaaatactgacattaataaacctacttgatgtatctatatagtgtgcttgggtactttagaaagtagttttaactgggaactcttcccagaaaatatttaatggacttcatagcgtgcacaaactcgtctcaaagagaagattcatttcattaatttcaaaacatctcacatattgtgttcttatagtttgatgtcaaattgatgtaggtaatattgaagaaaatttaatggcctttcctgataaaagctaacacggttttggagatggagtctcactctgtcgcccaggctggagtgcagtggtgcacctccacctcaactcactgcaacctccacctcctgggttcaagcaattctcttgccccagcctcttgagttcagctgggattacaggcgtgcaccctcacaccgacctaatttttgtatttttagtagagaagggtttcactatgttggataggctggtctcaaactcctgacctcaggtgatccacctgcctcggcctcccaaagtgctgggattacaggcgtgagccaccgcccctggtgctagtacattttttattgatttccccatttcttagacgtatttactttttcatttttcttttatacgatttctcaaatttggtgttgctgggacttgggaaaagtctcatacatttgactaatggcaggatgactcaatgccagtcacgtctgaatatgtagcttattacttgacagttcacgtgggaagtgtattaaaattattaagtcctattgtcccactccacagctttatgcttgatctagaaatctggcatcttatcataatagacacttgtgccctaaacccgtttcttatggaaggcagtgaagtgtcaagagcgtttaaaagccctgggcataatcctgccaagaaggaagtaaatgactcactgtacgggaatcaccccaacctttccaggtcacagaaaaccctctcctggagcattaaattgcaccctggtggtttccaaaactgaacaaagcaattctctcctgctttcataaataggttcagaactattattttcacagttttacaccctggatttcaagaaatcttgagcatataaaatgtagaaaatttccgtgtgcaggtttaaaaatcacactttagagagttaagtctctctgtgcttgagatgatcttagttaaacgtaatatttggggaaactgccatggggacctctgaatcaccacctttattgtctttaatgccaggagttgagctgaatttttaaagtctcctgcaaaatttatccaccttcctttcttcagaaaggcaaacaaatgatctttgtagtttaaggtgagtataaaagggcaaatgataatcccatgccaaggtggacacagaagtcttgaatgaagcaatggagaaaatggcagtagattctcacactctccccctttggtgtttcttaagttttaacaatatggatccattagatggaaggatattgaacaactaatctctattaatccacttagtcataaggccagagcaaaacttttgtttatggccaaggagttatcccaatgttccttcccagggtatccggtttgctgatgcggctctgattttgtactgaacatgacgcaggagcatctaggagtcatctatcatctgttctctccttcccgtggaagcagatcacttcctcatagggatgtgtcaccaaagcctccatgtacttcctctaacaatctttctcctcttacggaggaagacatcttcctacttcacaattttgtctcaactttcaatgaatccttttgattttctaattatggctaacaaaagctaaaacaacagaaattgcagaaagaggagaaaaattaactccaatttgcagacggaataggaggaatccctttattaaatcacttgctcctagttacaggttataaagatggcaaacctgggaagtaaagacaagagtttatgttataaaaggtagaaaataggagtggttttaattctctcatcacttagtgaccttttttcttttcttttttttttttttttttctgagacggagtttcactcttgttatacaggctggagtacaatggggtgatctcccctcactgcaacccgggttcaagcgattctcctgcctcagcctcccgagtagctgggattacaggcatgcgccaccatgcccagctaattttgtatttttagtagagacagggtttctccatgttggtccggctggtcttgaactcccgacctcaggtgatccacccgccttggcctcccaaagtgctgggattacaggcatgagccaccacgcctggctgacctttttacaaatctggtaggtttcataaattttttccagggtattttgctagttctcagaaataatttattttggttgttcagaccacagtcataaattagtgaaggcagcatatagaactgaaatttagcacccaacacaaccccatgattcatgctttcagacaaactctagcacagaatggataaagagctaagatcttctgacctgggaatacagaaaggacagaaaatgtttggacttgtatgtcttcaagctttgtttagtcaaacagtgaaacatgtgtacacttaatgatgaacagaattagtaatacaacccagaaggcaaagcgcacagtgttgctgaaatcataagcaaaagatatgttcgactaactcggacccttgcagagatttgtcaaacggtctgatcatccgaaaaatgccaactgtgacatattcttgactttttaagagagatttacagcaatctgctttaattttgcatattcatacttggactatggtggtcctgcttcatacatcctctaactggttagcctattcaaagaaaagtacatttgcatttcttttaattttaccctctcctcttcccatacctaggcagtgttatgacctattagaaattctgagttttttgttgatattaaaacatttatataaggaaactcaaggtgatgatacttaaaagccaaacatcacctggcatctttaaactggtatccatggtcaaccttcacaaaatgaatgaaccccttaaagcttatgcgagattgtgtttgcgtgtgtatgcgtacatgtttccagggtgaggattctttgctacccatctgttctctatcagtcataccaggcaggtgaataactactggatctttaaatgtgctatttgtctacaaaaactaaatatttatattttcataatacattttcattctcaaagataaaatgaacatatatattaacattaaaatacgtaggtttgctggaagaaagcagagcgtaaaaccatacggtgctatgggttttaatagcatcctgtgaagacctatttgcattctgaaggcagtgactgagcagtgctccactgtggagggaatctgggtgatgaatatggcctcagtggcaaaagacagcttttaagctaatgccttcccaacatacttcttaatgttctatgtaacttaattaaacccagaaaccactagtatctcttgttacatacttcccatttgtatgtagcaagattttatcgaacttggtaaacattcagaaggtagggaagtaatagtactgagtggctttactgaaagagcatgtataccattcagcatagtttataagattttgttcactaaatgctaattctctcattttccttcccattcactatctgttattgggtttgcccttaggagtgcccaagctaatgagtccccctttgctcaccaatgtatacagaactcaactaaaaataaacggatggtgaacaaataaataataaatatgtaagtatagagcaattatttacttttctgaaagatgatctttttggcctggcagtctttcaacttttaattccattctgattagcttcataaaattttggttaaattcaaaacctgctggtggaatgccttaaacattataatattcatctgtccacataccaagaactcagcaaataatttttaacttactatcagttacattgaggtacagatgtcccatatttgctttggagatatatgctatatacatatattttataagataatttcttttgcaacgaaaagtgatgggtagaaataattggtttgttgggtgaagggcaattagcggtatcatataaaagctcaagtttagtaccacaatttcttttttgctttagaaaagaaaggtacaccaacacccacattggttaaagtttggtttagttgtaatccacatcatatagtggcgaaaaatttatttatgaggtggtttaaaccttctcatgccatcacctgtttacctgtgacaaacctcccattaatgtctacccttgttatctccaatgacggctgtttcttgttgaacatttattgctcttctgctggaatttaccaaatagccttgagcaaaatctcaacttagtgatgaaaccgtgctctttaatgaagagtctcacagaattcatgttctatcaaagaattatgtgaagaagtttccagagatctcagcaaaatttaacatgtggctgaaccattcaaaaatgagaaaccaaagaaggatgccgatgctatagaaactgccaacattttttttttgctcaattaaactgatagcctgaatgtgaagcagcagatagaagcatgaaatgaatttcagtatggataagatggtttcaatcgttaagacactgaaaaaatccaaacaacacaactgggatagataaacagatgtacaggaaaatgtttcctaattctcacttccctttagaaaatgcagttgttgaagtcagaataataatcatgataactgtctgatgaaagatttagactaagtatctgtaaaaacaccaaaaatctcagaattacaaagaaagctttggctgtgtatcccttatctttaaaacagttcaagtcttacaaattagggggtgctaaggttttccaaacctaggcctacaatagaaagttgattgaaataaaaaatccctatctggcctttggtttaactgtacaggatcacattaagtctaatttctcttcaacagtcaggacatatcatcatcttctgtctatgaaggataagcagaacgctgagagttacaaggggaaaggctcagacagcatttagttcctgtttcatgaagctatgaatagtttgagtacgagccctgacaaagtaaaaagcaggaagtgcatgactgtagagggcaggttaagaaatgatgaatgcttagctttaagtatttaatctggtagcttgcaggcctccaaaggtggtagaagttaacctcctgtgctgcagttctggagaggcatttaattcttccagggggaaaaagtgctaactccttgattttccaaagaaagtctaaggaaagtaaaaaggtgaaggggttggtgtttagaagagtcactagccttcaacagagtaagagttttttctgagtgcaaagacacagctctgctcaacttttttttcccatggggaaaacaactattttaataattgtaatatttcaagtatttatctcattttttaacttttaattttggaacagcgtcttgctttgtcatccaggctggagtgcagtggcaccatcacagctcactgcagccttgacttcctggttcacactcacacctcagcctccagagtagctgcgactacaggcgcgcaccatcatgcctggctaattaaaaaaatctttttttttttttttttttgtagagatagggcctttctatgttgcctagggtggtctcaaattcctgggctcaagggatcctcccacctcagcctcccaaaatgctgggattacagctgtgagccaccacatctagcctaaagtatttattttaaatacatgtgcctatatatgtatgactctaaatatgagtcaaacaatgcatttttaggttgaccattcagtgtatttgcctataggtacataactaaatcagaaatttgaaacatacagtatactcagacacagggactcaggaaatgaaattcattagtagaacaaggaattctagctgcacaaaaacaacatctcataacacttccacgtttaggtttaaaaactgagtaaaagtatgatttaaatctgagcttcaaagaaactgaaaacaatccacattgttttggaatcccgtgtttgcaaagtctgagaatatacggtagaatttgttaagggttagacaggtaattattctaagtggtaacatctacagaatctatggaaacgacacttttgatttacttatattcaaataccatttactgaatacagttgtctgcattttccaggcacggtggttaagtatgagggagatctcagaaatatttatgtatgactcctattacaagatgtgatctttttcagacaaccaccagtaagctctggatttatgtcttcaagaggaaggtataaaagtcctcaagaaggcatttaattacgcctgcaatctcagcactttgggaggcggaggctggcggatcacgaggtcaggagatccagaccaacctggctaacacggtgaaagcccgtctctactaaaaatacaaaaaaaaaaaaacattagccaggcatggtggcgggtgcctgtagtcccagctacttgagaggctgaggctggagaatggtgtgaacccagaaggcggagcttgcagtgagccaagatcacgccactgcactccagcctgggcgacaaagcaagactctgtctcaaaaaaaaaaaaaaaaaaaaaaaaaagaaggtatttacaattttcttgtgcctgccaaagtgcagacctaagtgccaggtcaagccatacaacattaaaacttaaatgaacacctaaagatggtaacttaacaaaaatggcaagtaatgccccctagactccaggcctgtgaccacccagccacattttattacaaaggaaagatttaaaggtgagtcatggtggctcatgcctgtaatatcagcactttaaaaagccgaggtgaaaggatcgcttgaggccagaagttcaagactagcctgggtaacacagcgagaccctgtctttacaaaaattttttaaaaattagccacacatggtggagcttctgtagacccaactctcatgaggctgaggcaaaaggattgcttgagcccaggaggttggggctgcagtgagctacgactggaccactgcatgccagcctgggtgaaagagcaagaccctgaaaagaaaagaaaagaaaacaaaagaaaagaaaagaaaagagaaaagaaaagagaagattagagaagagaagaggggaggggaagagaaaaggaaaggaaaggaaaggaagggaagaaggaaggagggagggagggaaggaaggaaggcaggagagaaagagaaacagagaaagagagagagagagagaaaataaataaataaataaataaatccgagttaagaatttaacaggaatccttagatcaatcaacaacagtgatctgatttttgacagtaaaatatttcttcctaatccagtttttaatttttttttcaaatgaacatgttgcctaattccatatgaagcaatgcggaggcccacaataagcacgattacaaccactctaaaattatcccctttgataaaagatgacacttcggcaaacattcttgccactgcctttcctgtgatggctgatgagactaaactgagagtttaaatgtacatttgttaaagcctccattcagccctcagcttatttttagtcccatcaatgtccatttagcaaagatcttactttagagattggactttcagctggaacgcttcacaagtttctgctataaagattctggtctcagcacccaccagcctatccttctctggcaaatgatcacacggctcctctcctgaaagcgtgttctccaaaaaagagaggaaccaaggaacttttgttctgcagagatataaaaaaaaatttcctgacaagtgccttgctaagatagagaattttggcaaatagaaaatgaaaacgctaatatgaatattctttttcaaaagctctttgtttagagaggaagctcgttctagtgagaaggcaccacagtgactcgcggctctaccctctcccttcccagcagtgtcaccctgaaccagccgctccatctcccgaggttgcagtgatatcatcggtagaacagggtaaatagtatcttacgtcttggaagaatgccacgagctctttaacggctcctcatggctttctgtgcactgtaactttatccatagaaagaaaaatcaaaatggtgaggaaaatcggtgcaaatgggtgactttctggttaagttgcataaaatgcacaaacaattccagccaagattgagtgagaagaactggatttaccctcctgcctgaaccaccaataactggacaatatattcatatacaaacagcgtttcttttttttttttgagatggagtcttgctctgtcaccacactggagtgcagtggcacaatctcggctcactgcaacctctgcctcccaggttcaggtgattctcctgcctcagcctcctgagtagctgggactacaggtgtgcgccaccacacctggctaattttttgtatttttagtagagacggggttcaccatgttggccaggatggtcttgatctcttgacctcgtgatccgcccgccttggcctcccaaagtgctgggattacaggcgtgagccaccacacctggcataaacaacatttctgcaagacattagacatcaggtgaaggacactgattcctgaaaaggggaaacaaatgaggacttacagctgccaaactcatggccctgaatttccaggtcatggtttcaggtggggaaacccacacagagcctagaggactcgtggagtggaggacatgaagtgtgtggagagatcaaggtagttgtaattcacaggacagggtattggtgaggagagagttgctccaaaagagaatccagagatgtgcagagtgatccctgagaatatagctgagtaatgatgggtacatgcatgtgaaagaaactgaagccagggggaaaatcaccaaaaagaattagcattaacagtgcttggtgttcacacagggacaggaataatgcctcttcccacgagtcaggtgagaaaacttaacattcatggtagatgactgagaagggtcttgcctcactagtaaggaataactagtcctaggctgataactgcttctatcccacctaacaaatctaaaaatgcaaagctcaaaaggatcaaactgtttccaagtaactcaactatgtgacagaaaaaagctcaagaatattacaaaaacacctagcattcaacaggtttaaattcagcgtccgacatttaataaaaaattatgaggcataaaatgatacagggaaatgccacatgtaataataagcaatcaaaattgattcaaagttgacagagatgttagaattagcaaacatggatatttaaacagttttcatataataactgtattccataggttcaaaagttaagatacagacgatattatgggtgttgggggtagcccaggttaaatttctatatacaacaactacagtatgtgaggtgataagatgaaaaacggccagatggaattaagggcagactgaatgataccatggcatatcaaaattaaattgttaaaaaccagtgatatagagaaaactgtaaaaacagaaaaaaaagacatgttatttttagagaaataaagataaagatatcaacacaaataagacagcagagtatcatctttcaggcagtgaaagagaaacctcaatccagtattttttacccagcaaaaatatttttcaaaaccaaaggtataaaagggacatttttggtcaaagccaaacaaagatttcatcaccaacttatgtgcactcaaacttttttttttaaagagacaggatgccctttgtcacccagatgggagtacagtcatgcaatcacagctcactgcagtctcgaactcctgggttcaagtgatctcctatctcaacctcctgagttgctgggattgcaggtacaagccaccaagcccagtctctaagacattttaaaggaaatctctcaggcagaaggaaaatgataccagctggatctgcgcaaagagtttacagcacccaaaatgatgacttcatgggtaaacatgttgttttttttttaaatttacaactcattaaaaaataactgtttaaagaaaaacatcaacaatgtagtaaggaaaaagtatgacaacaaccgcttacagagagagagagagatgaaaaatggaagtacttttgtaaagtactgtctgtggagtggtataatatcatttgaactgacataacatcatcgtgacaagtttagaatgttttctataagcctaaagcaaccagtaaaataacaaactagttataacttataaacccacaaaggagataaaccagtaaaataacaaactagttgtaacttacaaaccaacaaaagagataaaatagaatcataaaaaatttctaattaatccaaaaaaaaaagaggaaaaaagaagaacaaggaacagactggacaaatagcaaacaaatatcaagatgacagattcagtgacaaccatatccataacctcattcagtgtacatggtcttcccaatccaaaggaaaacgcaagacccaattacatgctgcctacaaaaaatacacttcaaatataaagacaaacaaggtcaataagagtataaggatggaaaaatgcaccacattaatattaatcaaaagaaagctggaatagctttattaatattaaagtagattttggagcaaaacattacaaaggataaaaagatcatttcataagaagaggctcaaggagggcctaacagcctggaacatttacacgcctaaaaacacagcctcaaactatacaaaataaaaactgatagcactgtttagaaaaatggcccggtccacaatcacaggcagagctttcaatatcccttgctcaatgacaaacagaaagaacaaatggctgggcatggtggttcacgcctgtaatcccagcactgtgggaggccgaggtgggtggatcacctgaggtcaggagttcgagatcagcctggccaacatgttgaaaccctgtctctactaaaatacaaaaattagctgggtgtcgtggctcacctgtaatcctaggtacttgggaggctgaggcatgagaattgcttaaacccaggagacagaagttgcagtgagctgagattgcaccactgcactccagcctgggtgacagagtgagactccatctcatttaaaaaaaaaaaaaaaaaaaaagaacaagtggacataagttacacactcatgctcagaaagttccttccattccaagtaagctctcccacagaatgccggtgaacacatctatgcctgtaccactcaacatgcctttttggggcaatgatcactgaaaaccatgaataagtctcatcattgctaatgtcatgactgacaaatgcttccccacagagaatatggccactgctctgagatggaaatttgagttctaattctttctggtccactaaaaattcttacaactcagccaaatctcaactttccttgaccttagttatattattatacttacatgatgagggggctgggcaaggttacttctaaaatcctttgccatggtctgaatgtttgtgtctctcccacccccaattcatatgttgaaacctaagccacagtgtgatgctatttgagggtgaaagctttgggagacaattaggcatgagggcagagccttcaagattgacattagtacccttataaaagagggcccagagagctctcttgcccattccaccatatgaggatacagcaaaatacaaacaaaaacaaaaataaaataaataaaagataaacaaaatttaagttctatgaaccaggaagcaaactttcaccagacaaccaagtatgctgatgtcttgatcttggacttctcagcctctgcaactgtgagaaataaacttctgttgctgataaggtacccagtctatggtattctgttacagcagcctgaagggactggaagacatccttccagcttttgtgttcgaacttgaactatgccatcaattgtcaccacctcaggaatattaaatcaagtcagggcttgcaatgtgagtccctgggagtcctgtctggctgctctgtggggaagtgtgagtacctgctgtgtagagatgaccttgtggaggtagctgccctgtgaccctttgaccttcaagatggaatggacaggggttgaacctctgaataacagtgctcaaggcatttctcctcattctttttgtatggcttccagttcccagtgccccacccttactgtctgtgctgtgacctgaagtgtgaactcggctgcagcgagacctacccgaggaggaacagcctgcagagcggtgatgtagttctccagggccaggcggcggcggtcattgagcatggcttccactctggccatgtgtgtctccaccagctgctgtctctcgttggctgcttcctgttccaaagattccactttctcctggaaatgctgccatcataaacacatatgtccatggggactgaataagtaggatgaagcagcaatttcaagtcttctaaaaaagacatcctattccattttcttctagtgctaaaaagtatcctaaagactgcatagtcattccaacattgactaattctacgttttatagcttacttcactttcttgcactctccaaccctcatcaaacctactttctcattgaaaatcagtatttcataggctctctgaaggctgatttgactaataactttggataaatatatgcactcttgaaactcttatattacatattaaaaaaaaatccctctcttactaacagtacctcaagtaattgaccataataaactgttggtttacttaaggtaattttgagactggtttccatcaaaaattcaaattctcataatttttgctggagggagaagcagcagaagattgtggtgactgaaaagatgtattattaataaaaagtagattgcaagttacaatgtgagttttatggcaatgaattataacttgaaataattgggagcaaatataaggcaggatttaaacaactcaattactagacaatgattaagaacagctgaagttcatgggactatgaacaatcacacgtgaggtgctggcagataaaggtaaacctgcagacactcattaaaaagactgctggcatgtgatgtttggtaggaaatgggttcaggttttacctggataactgccttcttatcagctttaggcaagttctttgcttgacgttctgcctcttcccattctctcatgacctataaattaaggaaacatttgaatttaaaatcatcagttcatcctttgaatacagacttaataggatggatgattatgtttttcctctatttttgtcattttagatatttaaaaaatttattacataccccttcctatctgaagaatatttgacctcccactaggatataaataattaatcacagcagtatattaaacataaatgttcatatttattgcaggaatatagctttttgagtcaaggttggtctttttttaccccgagaactgacagtcatttgatttgatgtgaacaaataccaactattcatggaaggcacacattaactgaacaaggtcttccaatattaaactgaacacctaagttttactctcttatgaaagcaactgaaaccattttaaactgtatattttgactttaaagaaaatatgacattttatgtgtgtgtgtgtcatgaatacaatgccaaaaagcagtacataatgggggaagaaaaagaagacttctgctgtctaatatcctaagacctatccccctttaaagaactgatggggaattaaggccctttgagcttgccaacctaagtcatgaacagcaaggattacgctaagtccttccaaaaactccaagaaaacatgtaatattctgaatgcagcaaacatgtatttttttacaagtagcactaatttagtaaccaactgctatggtttgaatgtaacccctaaaaagcatgtgttggaaacttaatccccagtgcaacaatgttgaggggtaagtcctgtaagaggtgattcagtctctgtcctcatgagtaaattagtatcattatggggggagtgggtttgttattgtgagaagtgggttgttataaaactcagttttgccctcctcttgcccttcttccttccaccatatatgatacagcaaggaagtcctcaacagatgccagcaccatgttcttggacttccccacctgcaaaactgagagccgaattttaaacttctttttctttacagattatccaggctggggtattctattatagcaacacaaactgactaagatatcaggtgaatgtgttttgtaggaaatcaatgcttcctgctctcaactttgatgttcacctggatttccctgagagaagttcactcattaacctgatacaaaaagtaaaagtctgcacctctgtatgttgttcaaagaaaatattaacttcctaccacctacagctgccttttcaagtgtatgacaagtagaatttgtttgaagtgcaactctgaactaggtaaaatgaagaaagatcaaggaaacaaaatattggtttggtgccagatgtgtacttgcatactctgtgtactcccaaagcatgagaaaacttgattactgtattataagagcctgttttttgtaggtacttagccttaaggaatagactcttctaacatacttcaagatgggaaagaaaaagaggcttggaataaataactatagatagaagacttctatgagacaatactatatcaaatcaccatgtgggttcctaattacagattttattgtccattggcattcattctttgtatatgataggcaattagcttcttcttgttgtttttgtaaaaccatggaggaaacaagatggaataaatatttcattacacttgaaaagcatatcaaaaataatctcaaggttcacagcaaaattgggacaaatgccctgctgcaatgaacaagaatagaacatggaagaaaagaaacatattgtcccatctgctttggtgcttctaccacgttaataaagggaacctgtgggcaagggggaaatggaagaccatctttgctttatagatgagataagccttgcaatataaatatttcaatttcctgctttgggaatgttcacagtggtggtactctaccaacaattcttcaagcaaggaatctcaaaattagtttgagatagaagttcaatgttctactgcaatgtgagaactgatttcccatattacatttacattttttccattttacctcatacactttaagaaactggactttaagctttaagctgggggaatccatgaaataattaaagagatttatttagctaatgagttgcaaataagcattactatagaaattaactcacattttgattttcagaacaatttaacaatatcctatacccccacaaataaacaaatcacctgcaccatcccactaagactctactgcaaatgaatacacactatatgtaggctgaccatctccctgtgaacagtgaatttcactgtgggactgataacaagtagcattactgctgaccctgtattaagagctttacaaaatctatctaatttaattgattcctcacaacagcttgtgagattagccagggccatcccattttacgaaccaggttaaggtaccagctcgaggctatgcaggtaaaaaagggagagggaagaatataaaccaagatctctgtggctctaaagatcatgtttttgtaccctgtggtacccaattttttattataaaataaaaaattcattaggtgagctaagtttatttatatttagtgacaggagaaaggggcgctcttaaaatgttgctgcttatcttaaaaataaaaacctaggccaggcacagtggctcatgcctataatcccagcactttgggaggcccaggcgggtggatcacaaggtcaggagatcgagaccatcctggccaacatggtgaaaccctgtctctactaaaaatacaaaaattagctcggcgtggtggcacgtgcctgtaatcccagttactggggaggctgaggcaggagaatcgcttgaaccagggagttggaggttgcagtgagtctagattgtgccactgcactccagctgggtgacagagcaagactccatctccaaaaaagataagaaataaaaacctatgagttgggtcagctttcaatttgaaggacttcattttaagcatatactaaaagtagtaagtttataagtaataaaagtgctcacacatggttcagctgtagatttctatttgactagatgctagtcacgacatatagcaacaaaaatctacaggtttagcaacaaaaatctacaggtttagagttatactccacaatggcaacaacaaaccaaaatatgaaaaaattccaaaatcctctgtatttgtaagaaaacatataacaaaaactacaataaaacttaatttaaaaaaccgcacaatttttaaaatttaaaattctcaggacctggcccttgcagtggctctatggattcttataaagcaattttccactgcaggcacaaaggtatcaatttcatttggatttatcaatcttcaaagacttggctgtttcatgcagagaaaatgactactactaagtagagatttaagaggcaggcaagtttaaagttgaaaagtccctagatttcagcaccacagactatgaagatacatattgatttcaggtgtctcacattcctatgaccactggaatctagtagacaacattctctgctctgggacaacatctcttaggttatatcagatatatctgatgactaaaagatgaacaaaatctacaaaatcatgaactaagtcacaagttacacagatgtgctaaaagttaaattattattttaaagaagacctgtcacatctaaaactaacagagaatttgaaataagttttcttaataaggtcaaaaatgaacaagatatactaggagaaaaaatccaggattaaaaaaacacacattaaaaaaaatgctacagtgggtccacgatgaatgcaggtagcaggcttcatgacttgaggtctcaaggtttctatccagcttggaaagataatgcaggtgtgtccagaaatcactaacaaaaccggggagcaaatatttagaattaaatgaaaggtaagagcaatgactgcctgtctcattctgagtatgaagtggggtgtaaggaatgggtgagatgtgtcagcgtgaagaagagtgggagggcatttccagaagaactcaatgccaagggcaaagggaagcccaagatgagatgaacagacgatgagcagagtggcctgatcagaacagcagcttaacgctgtacagaaagcaagggtagcagttgagaaggaagaggtggtaggaagaccagagtcagggtacagtggtaggcgctgaaaatgacaagctgagcattcggtgtttatttttgtcattgttctttttttacgacttcatgtgcccagaagtggatttgtgagggcacaggaagcctctgaaagcttcataaagaagggagataggatgtaaattcaaatgaggacatttcagtggcaataagtatgattcatagtcctccaatgctttccgaacagtgcctgtgtctttcctaaggaaagatctgattttcttggcatcaggtgaaaacttaataattccctgtggctagctttctagttcaattagctgttaggttttcatcgtgggcagccactagaactgcacattatattccagagccaaaagtactgtgattataaggcttttttcctctttatgttattataccaaagtagatccaagtattgttattcatcttaaggcaaaacaaacaaacaaaaaacaaaacaaacaaacaaaaaacagtacctgtgttgtacctttctagataaactattagttttatgttttcaagggtagattttcttattattcaggtgaggccaagaggtcaggagatgattatcatggaaaagacagtttgttactcagctcccaagaagccggtacatgccactacatgcagggtcatatgggaagcaccagggttggtcaggaggggaaaacatgagcaagagccttttattgtggttttcatggaaagaatgagcgaagcagggtaggcgggtttaggactgattagttcaaataatggtgatggggcatgaggttgtccctagtggtctggtacctggtcctggggtgattagagcaggtgaatagtggcccagagtataagaaggtggttgggagtaaggagcttttgattgactggtttgcatgggaaagacatgctcaggggccattcatttggccctgggagggaggaatcttcctggggtcagcagggacccagatcagaaattacaggaaagattaattgtctactaaagactgactgtgatcttagaaaatacgcagcagtctaattcataaattgcatttaatgtctctcaagagattaagcatctgtgctaagacaaaaatttctcctatcttctgatatttgccacagaatattaacactaaaaatgaatggcttactttaacctgagatctttattcattcacttttatgtcctacttcttttccccccacattcactcctaggtttgtagactacaaatcagaaaagtgactggaaaataataagtccatatttgttgattgaatgaatgaatgaatgaggaatctgagcaagggctaaaatcctccatattatcaaactccaatacaacatccagtgcctggtagcagacatagcttcaattgtagttgatagtatatatggattagccatgttttagacataagttattttttaatttgcttaattaaggacctgctaaaaaaaaacaaaccaaaccaaaacaggttttttttttttttttttttttcagcaaagtataatgaaaggagtactgtactaggagcaagaaaggcctggattctaaatgttgtctctggctcactgattttgctttgtgctaaaatgggaagccactctctcgaacctctattccactatgtatcacttaggagactagatgaaataatcactatggttcagctcagttttaagtctctatgattttacagactgtaaacaatcgtaggttcacaattataacagtctgggatttaatacaaaacctcatctttactaaagagcattttgatggattttaatttacaacatgttgattacaggtactacatatacacagaataataatgccaagtacctttcttcgccagagagaatgttacagacatcatttaatttgtgcttacaaaatccaactatacctggatccttcctaggcagcatgttcacggaggatgcaaaaaacccacaaactgtgcccacacagtaaacatttaaaattagaactttacatctttaaagatcttgataaagccagcaggcctgtggggagactgaggcagaggcaagctcaggtttcccaatatcgtagggctgaatgatggaagagccagacttacctgggacattctctctcggtgcttggcctcaagcctctctttggctttctggaaatgggcatgttcattctcatccccaggtgtctcgagatacttgtcaacggcatcaggggtactggctgctgttgtaggaactataaagtagaagagaaggaggtttgagaaaaaaaagccaacaacaacagaataatccactcgtttaatagaaagccgtattttcagttatttctcagaacagagaatttagtaaagcagcgcatacaagacgttaatgctgtttaagagaacaccatgagacactgtgcagcacagtaaggatgtctttcaccactcccaagtacagaatgaaggaaaaatctttaaaatggtccattttgcaattatagcattagagttctttacgaaacaagcatgcaaagagcaaaaacagttggtgctgaagacatgtttttccaaatccccatgctttcctaaattactattttgcaattttgaaagtaaatgatgatatcatcaatatcatacactaagactcctgcagaaaccacagatatctgtaattagcctgttgtagaataacggcaccccagggaaaaggtaaatgtatgatgtatttagataactgaattacgaagacaaccttcatgagacagtatggaaacacgacaaaagatatataaacatcaataaacacatttttgaatcacaaaaggacttttctgtcttcataaatttgacaatagtcaatgaattcattatgctagttgtcaaaaagaaagtgatttctattttgaattcaactaatactgctaagcaatatttgaattgcaacatatactgctatattatgtaactcatgagccaagtgaattataatacctatacaagcaattttccaaaagattagtgagaattcagagtatttatgagcttaaaagcaaaaagaaaaaagaattttgacttaagaggaagcatatttaacataaaaaacaaaatgagacgttttcactatcttttgagatcaaatcaattgtttcattcaaaaggttattcaaatatcaccaatgttccaagtattcctattgaattattacctgtgtattacatttgggatataatatctcaaagaggacttcaatgagaagaattgatagctaagtcattttgaaactaaacttgaagttaaatacgttttctacatccttcaagaaaatgtctggaatcttaatccaaagtcttcaaagatattaactaaaaccggaaggctgttaaataattaaacagtatctttcattttaaaaagaaacattcgttttgattttttccctccacttcaatcctgattaataatcatttttcaaaaaataaaagcagttgagtgtctatccagatgttgctttcaagtggaaggaaggaggcagggcatattcctggtgcctttacacagctgcccctgtcttctctgtagcaaatgagggagtggtgttccttcttacattggcagcaacgggggaaggaaggaaggaaggaaagagtcatgtggggatttgcaattaagcacatttggatttgaatcccatttctttttcagatcagctgtgacctggggcaggaaacttaagcactccatgtttcaatttttttatcaagtggtgataacatgccgcaggacatgataggagagctgggaaaatgagataccataccacatgtaagtcatccggcagagagggtgacacacagtggagctcatacatgttagtggccttccctcctcctctgcttaatacatcctgttcaaatctcagagctaatgctaaccacgggaaagttctgatacttttattcaaagccactgaaaatgttttggtagaagagtgcaataataaagaaaaaaaagaaaaggacaagttttaaaattttaaaaattgagaaaaagaaacaaaagaaaatacaaactaacaaaaaataaataaaatagaaccactgaaaatgaattacacacaggatcacaaagtgcaacctacaggaaaagcagtatgtatttttcaaaaaatgttaggtgtagcccacataaaaaaggccgaaagtatcaaaaataagtaaattgttaatttgtaagattgaaacaataattttgaatattaagacctttttggaaaaaaggtaaatgtttttctccatagcttcaagcaaaccaatatgcaagtatttttaacttaatcattaagttaaaatgaataaatgctaaataccacgttcttactgactttaacttaatgattaagttaaaaatacttgcatttcaagttcccaacttgaaatgaacatggtatttagcatttaaaatgtgcttccctagctttagtcatcttctcatcttaactggtagagctcaaatgagaacaagttaaagtaaaagcagaaaataaaacagtaacattcttttgcatagtccaatctggcagaatgacatgtttaggcaaaccatattttatgtttgaaacaaatgaaaatgtataaatatttggggttatacctgctgatgaagatagtcatctggctgtaactgttataaccataacataagcacccctttggaaaactggaatcataaaacttactatataagaaggaaattttttcagctcctatggtttgcgaacactgtctactgtataaaggaaagaagataaacactataatctgaatcactataatcagattggcctaagtagaaatgcacttagcaacataataagagaataaccatggaacatgaatgtgaggtatgtttaataggactgaggatattaaaaaggataaaaaccttctttttaggcacgtggaaatgaatatgaatactatattaccaacttaatccattgaatccagaaatatttctgtggtaattaattttctgtgccaacttgattgggccgcaaggtgcccagattaaacattgtttctgagtgtctttgtgagggtgcttctggatgagattagcatcggaattggtgcactcagtaaagtaaatcaccctcctcaacatgggcaggaatcacccgatctgctgagggtctgaaaacaaaagggcagaggatggagcagttcaccctttttatttcctggctgcctgagtcaggatattggtcttctcttctccctggactgaaatttacaccattgtcttccctggttctcaggcctttagatttggactaaatcataccaccagctctcctgggtctccaacttgcagacaacagattgtgggacttagcctccataattgttgtgtgagtcaattctgcagaatcaatctcttcctatacatatatatcctattggtcctgtttctctggagaaccctgagcaatacaatttctcttcaagtaaatctttgttaacagtcccagttatttcccatagttgaggaagctgtgtctctttttatctttaactcaaatttttcagccattcatacaaactccccatctcaattagtgtgagtgaaattatcctatattcataccaaccagcaagccagattactgtctagtcaagcagagaaggatagcatatgctgatattgttaaatgaatttaatagttcattactactgctctgcagctggtgaggatcccggaaggagagagcaattttaaggtggagtatgtccagagagctcaacttctatttcgtgaatatccttatatcctaaagagattaaattcataggactgactaccattttgtgattatgtccacagaaggccagagacacgtgtgccctatgtcctcacccatcaaggtacttccttttgggaagggagtggggctcaaggaatgtcaggatatgtcacaggacacagaggaaacaggaagctgtatatcagcaggtcactgatatatttaaggtacttaaaacacaggtcactgtaaccacttagaaagtggaaacaaactggctttaggagggtttatttctggttttgcattttaaactaccataaagcagtttatcctgctcacagacctctgagattccacggaacctctgataaaggctaggatttcggccggatggggtggctcacacctgtaatcccagcactttgggaggccgaggtggacggaagtttgagaccagcctgatcaacatggagaaaccccgtctctactaaaataaaataaaataaaaaaattagcagggtgtggtggcgcatgcctgtaatcccagctacttgggaggctgaggcaggagaatcgcttgaacctgggaggcggaggttgcggtgagccgagatcatgccagtgcaccccagtctgggctacaagagcgaaactccgtctcaaacaaacaaacaaacaaataaataaaggctaggatttccatgttggcactccgtctcaaataaataaataaataaaggctaggatttccatgttggccaaatgataacagcctcttttcatcagagcccaccatgctaggcatgttctgtgttctcgtttaatacatgggaagaaaaaattaccctattttattgcgtagaggcaaaacactatcatttaacatacccatttgcatccctaaacacacacaaataaagtctgttaagattgggtaagccataaaaaggctgtaaagctaatttttagagtagtaaagggccaatccatccacatgctggggcactgtaaagggtttttgttgttttgttttgttaatgagcagcacaacttggcaaaacaaccatatgctttgttatgatgtccgttggcttgttttctatgaaacagctgttcctgccccaaacactatctggcaaatccttcaacagaagttgggtcataaagcagggatcaagtgaaagagcccatggagctagaatatggaggacgttctggccttgggtccctccttcagcctgctcactcatgccttctgcaagcaagctggctaggtatgttcccccctccacaaaaacctagacttaaaacgagacaaaacacagggttcaatatccttagctctaggttttgacctctagatgcctagtcattagcagcaataccaacatcacatgcataagcttttaactttttaaatgacctttgtattttagtctcctaacagagccttgaggggcatggtaggatatataggctattacctcccttccttttaatagtgatcatgtgtatctaaacactcataacaaatgaaaaaatgtaacagaaaagcagttctaattcctagtacatcactgcttcaaggtgaatatttgcttccaaatatacagtggcattttggatgactaacgccttctacataagccacatccttattctttgccaccctgggaagtcagaggtatcaaagcagctgagacagcagctctgacatggacaaactatcctgcctttagtgcgcctgttcattcttttattcctccagcccaccaacattgcagcccttattatatgtgaggcacatgggagaaaccaatgagaaaaacatgaaggccctgatcctggtggaattatattctagggaaagaaacaattaccacaagaattttttaaaagccagtaagtcatattgttaatatgtgatttgtattatggagaaaaagaggaaaaagaaaaacagagcagagttcagaaggatcgggagagctgaggggagaggggaaaggtagaccgcagtaagtgagcgaccaggcagagtcttaagtgaggaggtgacattcagatcttcccagctggctgctggaaggacatggcaggcagatgacaaaactagcacggaagccctaagagttgaagctggctggcaaattccacgagacccgcatggccagagctaaagaagcaagagaggaagtagtgggagaggcagggaagaaatgggggacatcatgtacagccttaaagccacagtaaggattctgagggaccagcgtgggctgtttgagggggagtatatgtgatggggcgttttgttgaaggatcactctggctgctatgggacaaaagtagaaggaagatcttttaagaggaaaagacaggctgggtgcagtggctcacgcctgtaatcccagcactttgggagtctgaggcgggcagatcacctgaggtcaggagtttgagaccagcctgaccaacatggagaaactctgtctctactaaaaatactaaaattagctgggcgtggtggcaggcgcctgtaatcccagctactcgggaggctgaggcaggagaattgcttgaacccgggaggcggaagttgtggtgagccaagattgtgccattgcaccccagcctgggtgataacagcgaaactctgtctcaaaaaaaaaaaaaaaaaaaaaggagacaaagatgaaggtggcttggaccagggtggctgtcacaggaggttgttgccctcagcccccttcccacacgagaagggtcagattcccttctttctctcacaccaaaatgctgtattacctcagggaactgaatatgaaaacgggagaaactgctttcacatgtgcgtgagggctcatttcaattttaatactgatacacgcatgcttgtcacaatactgccacttcacactgtgatctattctcaatacctgccagagctctgttttctggggtgaagtaacacaggttagctttcagtttattcataaatggcgatgctgcacccaacgttcctatcacaaaatgctcctccatcactggggccaagacaccaacgaaacattttccatacctgtgtttcctctgagaaaactgttagcatttgaagggaagttactttaaaacaggggaaaacctgctaatatcttcaggatgaggcagacgtcactctcctagcctgtctgaagactccttagaggataatccattaagttgaactgtacatgcactgatttccctcattttagttctgattttgtaatcattgcggagcactccatttcatattcatactaatgtggtacttcacattcatataagaatgtggggtcaaaattaaaggcactgtgaaagattgcccctatcattttgatatgcatttgtttcctcaggcttctggggtgacccataattttacagtcacaatggactcaggacacaaaagaagaaatgacccaccttcaaacagcaatgaccgtggccatctccaacaggccagaaggctgaatgtttccctaaaccaaggcttatgaatggcattcagtcgatatattaatattagattctaacaagaaaattgggttagtctcctttcatcagcagaaaagcaatttatctctacagccttggtaacagaagattaaaacaaattaagacctatataaatcattgccttatcattgaaaatgctatttgataccgacccagcaatgttgtcatttgagatggctataatttaggaaaggagacaaggaggatcatttatatatgagtgaaatataaacttgttagcgttcatgtgaaactttaatcttgaaacatggcagagctttccgagtgccatgcttattataacttaaaaaaaaagtgtctctaaaaaaaaaaaaagtgtctctccattttcctaatttcaaaaatagttaaaactcctaacgcattctacattcaaatatttatcctaaccattaagtccaagatagaggagccatttataacaagaaaatacagtttgtgatcctccagtgtaataccagactctcttaaaaacaaaataacaacaaaagaaaaaacaaaggcattctccccctaatatgcccttgtattacaattttatagtcagtgcaatcatagttggtggagaacactatcaatgcatcacatggacataaggtaataaaaatataatctatgatgtgtttactctagtcaagctacatttcttttttatgtccatggacacatactgacatgggaattttttcaaatatatgaactgaatgtgaaggaacgaatgctggcattatttttttattaacatctattctctattcagcacatcacactaaaacttaaaagcaacctcaagtttgaatctaaaaaatatatgtgaagcaatagcaataactggcgtccagaatgggttaaccttaggttattgttttttgtcaatttgtcagaagctattcttgacttcgttaatggaggcacataaagaaataacctgtcatagctgctcaacactcaatagatgagttcgaaaagtcaaaatcttcaatattgtccagtttcatataaactgtagcagtaaaaggagatggtacagttaacctctatggaggtcttaaggataaagctgatttcattttaccccagccttccagagcaatcttctcctacacttctatatttcctttatatggttatttacctctacggcatatctgggtctcaactcattaataaaattatcaggtattgatagccagtactcagattcctttgctggtgtctctcaaaatacctggcctcgcacatcctggggtcaaaaataactgctgcacagttcacaactgcaaagatacggaaccaacctaagtgcccatcaaccaatgagggataaagaaaatgtggtgtatatataccacggaatactagtaggccagaaaaaccacaaaataaaagtcttttgcagcaacttggatggaggtggaggccattattctaagtgaagtaatcaggaatggaaatacagtatgtattcccttataaattgggagctaagctatgattatgcaaaggcatagagtggcataatggacattggagactcagaatgaggaagagtgggaaggaggagagggataaaaaactacgtattgggtacaatgtacactactcagtgaaatggggacactaaactctcagacatcaccactatacacttcatccccgtaactaaaaccacttgtatccccaaagctattggaaaaaaaataaaaataaaaataaaaaaacctgctgtattaaaccaaggatcagcttgctggctaccttttttttcccccttgagatgaagtctcgctcttgtcccccaggctggagtgcgatggtgtgatctcagctcactgcaacctctgcctcccgggttcaagtgattctcctgcctcagcctcctgagtaggtgggattacaggcgcccatcaccacgcccagctagtttttgtgtttttagcagagatggggtttcgccatgttggccaggctggtctcgaattcctgacctcaggtgatctgcccgcctcggcctcccaaagtgctgggattacaggcgtgagccactgcacccagctgctggctacttttataaaagtagtattatcggaacacagccttgtctatttgtttacttattgtctattgttgctttcatgctaccactgcatagttaagtagttatgacaaactgcatgatctacaaagcctaaaatatctataatctggccttgtatgaaaaatatttgctgaccactttattaaacgatccacttaccctcttttggcaaatagctaaacaacagagcagagacataatgaacattcttttaccacaggtagaacatctctaatctgagaatctgaaatgctccaaaatctgataatttttgagcactgacatgacatcatggtggctgggatagcaacacctttgttctctcacagtgcaacgtacagaaactttgtttcatgaacaaaattatcaaaaatactgtataggccaagcgtggtggctcacacgtgtaatcgaagtacttcgggaggccgaagctggtggatcacttcaggtcaggagttcaagaccagcctggccaacatggtgaaaccctatctctactaaaaaacacaaaaattagctgtgtgtggtggcaggcgcctgtcattcattccagctacttgggaggctgagacagggggatctcttgaacccaggaggcagaggttgcagtgagccgagatcacgccactgcactccagcctgggcaacagagcgagactccatctcaaaaaaaaaaaaaaattgtataaaattatcttcagacttttgtataaggtgtacatgaaacataaatgaatttcatgttatttcatcatgaatacatcaatattccgaaatccaaaatctgaagcacttctggtcccattttagagaagagatatttaacctgtattcaaagtagatggcccttctttttaaaaaatgctgagttgctaagcaatccagttcctttcaattttagggtcatctctaattattatggctttgaagaaaaagccattcttcctatctaagcatttccagataccaaagatttagcttttcacacttgttaatctgatagaatatactggcactgacgtgacaggtagtttaattcaccatcacatcttttaatgctttaaaattgttctccctccctaggttggttggggagcaaagtgtaatcccaggttgcctaatctaatttggcagttttagttccaatggtattgcagaatgtgctaatgggaactaacatttgctactgcacagtgaaaagaacaagaatagtgtgattaagaacaatagttcaaatttggccaaagattaaatggcctaggcattcagacttctgtcttatggctcctgtctttacaacgaccctggggttaaggtggcatattccattgaaaggctgcgtggtgtgagttttctacgatttgaaaattatgagcttctgcggcaacaaacttggaacctggggatggaacttggggcctgacttgttaagttccaattcttttcatattctctgtaagtgtaccagtctgtttcatgtcatctggaccattctgatgtgcctagaaatcaatctttttccctccctcaatcctgcatggggtcaggcctacacctctgcacaaactataaggccatcaaacataatcctaaagtacaaataacctgtgtagcaagactataggacatctctacagatggttgtcctccagcatatcctgggattctaggaaactaagatgaaacagagaggagaaaggggtggtgcataggtgaaccaatgacttcaaactaagggatttgctggtttctcttctgctgccacagtagcttacattagagcaggaaaactacgagaccttcaatactatagtcaggacagcaacagcaacttccactttaccttgcaaatattgagagcttggacaatagtctaacaaattcaatttcaaacatctgtcgagaattggatgatgctgacattctaacatttcaacatgcccccaaatttgtggaaagtacacgtgtttacaccaggagagttctatctctgagtcagatgtggggaaactactactctagaacaggattctcaaccagaatgtgaccccctgggcacatttagcaatgtctagagacatttttagttatcacagctggagttgtgttaatggcatttagtgggtaggggtcaggggtactgctaaacacccatatgcctaggacagactcctaaaaattaattatttgaatcaaaatgttaatagtgctgaggttgagaaaccttggtttagttgtttgtaccacatgtcagcgcaaatgaaggagcctgagatgggacacactttggccagatcacatggtgcaatctgctgactaaaaattggcatgatgctctttgagagattaaatgccattaaggagttggtctgtttgccttttgggatgcagtctgatggagacagcaccaggaaaaaatggtcacactctcatatttaaaatataaatgaatccacaaatatttatataattttattgtctacaaatactatattttgaagattaaatgtgaaaccttttgcactgtcctaaacccaaatgggcaggtgcaaaactaatgtcagaaattaactcagctctcgtaagattctttatcccaaatgagaaagggtttttttttaatgatttgaattcctatgttcacgaataaaatgaaagctctcagccttatatttgtggtttagatttttatttaaaataacaacaataaaatatgtccctaaaattgcaatgctcaaaattggtttttatgacaaaagtttgaaacctagaaatgcctgatttatggcaaattattgtttttataatgcaaaccatcatacattttctccctaagtgtaatcttttatcagttcaactgaagagctttttctatctcctttcacatttgttatttgactagaagcagcttagactgagcaacctgtaaaaccaaccacctttgtgcagaaatatcatccaactggctctagattgttgaaggagcaaagtcaagtccaagttgcccagtctaacaggcttgcttaccttctagttcagctccttttctctgaattgagtctgccatctgaatttgacctccagatgaccatgactttttcaaatcaaatgtgcagtttgctataaataagaccacatagctgcacaggctataaataactagaaattatatgtttttttccttgtctgtttgtactagcactgcaaaacccttcacttgctgtgattgaatagtctctgtaggcagacaagaaaatatagctgcccaaagcacttcatcctcctagaatggaaaggtgtcaggatcccaaatacactgcaagtagatggagaaaattactgggaaggagaaaattacaaaagagactttcagtatctgtttggaacagtggatgatgaaagtggtagttacgtgtacagcatgaaaataaatttatcagacaatgatgcttgtttccatcagttattaaaaatggaaaaatagaattcttataaatgctaaaatgaaacaagagaaaaataatcactgttttataaaagaatgggaaagacatttaatttactgatgcgtgctctattcatggcatttaggaaaaaatgttaacattcttcatcctcttttcactgttttctgtattcttaaaatgtgcttctgaatcgcaaatgtgatttcactaaccggcaaaacaatgtcagaaccaatgcttagccatttggtgtggagtgcggccaaaacgtcattttgggtttcaaagcctggtcctgccatgttcgatggcttgggacaagtcactaagctcttgaagcctcattttttctcgtatgtacaaaaggaatgaggaaaatgcccacaaagtgttctgaagaaaaattaaatgatctgtgaaaatgctcggtacaatgcaactcaacatgcgtacctatgtcaacactatagtggaatagctagagctttttcctagtctgtcaacccacttgctgtacttacagtgtttttagagaaaaatgcttttttcacaacagcaaaagaaacgtttatgttgcagcagtacaaaccacatccttcaaaagttatacataatgtgaattattctgaatattttatggaggccattaaaaaactttatagtttaggatgcagtcttttttaaaatacctaatccttcatctataatttatcatctttaaaaaagataactggcttcatcagttttgagatgagggtttttttttttcaggataatgtacacaaatgctaattataaaatatctaagttacaactgaaattgtgcctcttcttccagcaatcataagcataaatggcatatatcatccctaacctaacactggataaatctatttctggatggaatccaaattcaaatatgagtactaaaaccacattttaaaactaaactcgtctgatattacaactgaaataaaaacaaaacataagacactgtaagtaaggcctgcagtggctggacaatgcatttctttataggaggctctttctctacttcctagtcaaaaggtgagcacctctaacctaccattatgccttctgggagaggagaaagaggggttcctaatgtctaaaagtgacccttcatgtctaaagttgaaaccgggtcttataacacacataaattgaaatctgcgtgtacgaattagtccatgtactacaataccatgaatattaagtactttttctgaggaaacaagttacttatgtattatagtctcttgttaaatcatggcatcttgatgtaaccgagtactctattttaaagatctttcttcctttcttttccttccagttttagtaatgaaatggtaacctttgctctctttcttcccaccaggcactccctgcacagcgcttccattatctaattacgcttataattattattaaaattattaatgcttgcttagaagttccactgactgacttaggcaccttcagaattctccctcatcaggagatcacctcaaggctgcagttaatttacaacccgattgtgcgggatgcgccagcccacttaccgaactggataataactcaagtctttggaacaagtcctgtatagcagcacctcctcacccctccttcatgccctgcattccaagctcccctttttaagcctttgttttttaatccaaaatttgagatggttgctttgaggcaggagcctggaccatttccccattgctagctttgctaagtaaagtcactttccttccactgcacctagcccttgttcttcagttctgcaaaagcagtgagaggctaagcctgctctcagttacactgatagcttttaggaaataaaatagtaatggcaaatacaatacaatgatgttgtccatataatattcaataaaaccagactaaataaaaaggaaattggtcagaaatagaagaaacttagtcaatgatgctcttagcccaacatctcaagctgtctggcaaaatcagatgtaattacaagcaaggtaatgggaagaaacattttactaagacaggtgttcaagaaacacaaaaccatgcaaagaaggtgatgatgctggagttatgtgaaccaagcagcatcctcctcccctcttcccttccctcaggtgaatgacaacgtacgtttaacaggatctcgggcaagaggttcctgggtagtcttgagtaaactttgggacactatggaaaaaataagagaacataactaaaaacaaaaagagaaacatgggaatgatggctgaaatgcacgagtccactgacaaaaaaacaacctaacaaacaaaatcactcacttaggtttggtccctccaacaaaaccaaaatgaacatataaacataagatctattttcgtaagaagttaacatttgagaatgctggatattttgtctctgatagtatatccgagtaacaacaggtttcttaacagaagaggatttcttgctccttttgtgccaaatatccccaattcccttcgatgcattttttcacaaaaactccatttatttcactcattcataggacagcatgtggctctcggctctggctgtttgctgaggcttatactctctacttattcttgtccacccatctaactgatcttcagcctttgccttcttcatacattattctgtcacctttcccctctaaaatcaggcatagctagcctcatctaatacatctctgttgggagcatcgaccttttgcaaaaccctcagcaaactgtgtgccacccaggacacctggacaggtgcccactggtcactcccagcccaaactgatcaaagggagagagtgttaggtgaagggatggcagtactggggtgaggtggagagaattttaatctcttgaagcaaattcatcactgctaataattaaaaccaaataaatctcttattaccaaaaactatacatgatatttcagaaaatgaatccacccagggaaagggagaaaaaagttgcaaatctgccaggaaacctctcccaccggctaaaccagtgagaatcactgtaacaaaaggcctttgttccaaaggctgcaggcaacagaattctccattgtgttcgcaatacctgacctaattgactgctttgtttgaaactgaagaagggagtcctttgatccagaagctgcaatcatccaatcagagccagaaaaaaaaaaaaaaaaagcccttgaggttatcagttcctacacctgttcacacatgggactgaagcagtcatctcattcactggcgatggcaggagaccaacaggagcttttccattacattcctcttagatcctgggctcctttacagtgggggtattaatggtgcaggcccttctgttgttttgcttaatcctaagatcttgctgcaaaacaatttatataatccctaggaatctcaggcaggaaatgtggctgccacccttgcaacacagcggagaattaggcaggagtctctcaaaaaagtaatacacagttattgagtttcatttttagttatcaagctgagctgaataattacttcttgagtagttcatacttcctactcatgaacaacaacaacaaataaataaataaataaataaataagcacaattgggaatttcacttggaagtctgttaacgacatggaagtctcacatctggtactggacctcctgagaattacctctttggggaaaatttcatcatgcacttaagtcatcatgacttcatatttttatcccccggaattatgaaaagcttaatgttcaagagaaagactttgaaaattatgttctggcggggtgcagtggctcacgcctgtaatcccagcactttggatggccaaggcaggtggatcacttgaggtcaggagttcgagaccagcctggtcaacatggtgaagccttgtctctaccaaaaatacaaaaaattagccgggcgcagtggcatgtgcctgtgatcctagctgctggggaggctgaggcaggagaatcacttgaacccgggaggcggaggttgcagtgagccaagatcacgccattgcactccagcctgtgagacagaatgagaccctgtctttaaaaaaacaaaaaaaataaaattatgttcctcgagccttatgtcattgaaagtttctcacgttaagtcaaaagttttcttctactttcaagagaagaagcagaagtttgacctggcaaatgtctgtgtgctgagctcggagggggcaagacgggcacttctaccctccggcatttgagatgcatgagctcaattcaatcacattccctcatcagcacaataaaagacatgttatgaaccaacttaaaggtattcatcacagccatacaccttatcaatgcaactcaagctgcatcagccaggcttccagtggtagacagtatctgcacaggtagtgcacatgcataaacatgaacacatatgtacacggacaaacacataagtatgcatttgcagaaacggctggctgcagaagacaaaacagccactccagctttgtttaaaagagaagcactcaaaagtccctctggattgcaagacatatgtgctacagctaggaagagaacacatccatggccatgctttatcagggaaagacggagaggtgtgctcatgattgaacatactgcggagactctgagcaattagagaagtggacagaaatgtggttagtggtagcaacaggcccattcccaagaaccaggaaaatcaatctgttacaaaaagcagagtcagtggcgagagagacgaaaggtggccaggctcgaagaagggtccacttactggcgctgccacacacggccatgcagtactcttctgtgtcaaagttgttccggttgccgccacatccgccgtaaaagaatggggcacacttcccttcagtcacatcaaagtaccagcgggagatcattgctcggcacggccccgtctcggcttgttcagagcacacctctaatcagaggagatgtggggaaccacatttagcatgaaaaggcactgtctctctgttcatgtatacacgtttacttcttttaatcctcccagtggcaacctggactggtttattaggcagcatctaccaaacatttactgaggaatttaactggccaccaggactagagatttacacctctcagagcatgcactgtcatctggtttaatgagtgcaggactcggtagcaataaaaggattccggccaaaggtgaaaagatcatttggctgcttttagatgagtatgaaatgacggaaggtatctgcacatcacaacaatcctccatcataaaaaataaacttctctttttaagaagtcaactttcatgtaaggaaactgctttggttatgaagcgaaagtttaagccctcacaaacatctgattgctttccttaataaatgattgccttaactcaaatataaaattaattgcatatattttgaatgttttccagtgttggaagctgtctgtccattgactttatctggaaacacatgtcatatctgtaaatgtgacttatactcaatgacattaacttaagaccattcatttgtatattaagatatgtactaatataaacggtcttaaattaactctgatttaagaccattttatttgtatattaaaatatgtatttatatattatacattaataatttaattacatatgcatgaagtacatctataacaacgtattattaattctgctatttaattgatatttatatattaaaaatctgtattatttgtatatatttacatacacattaagtacaactataacaatgtattatttaattatgctacttaattgatatttatgtattaaaaatctgtattatttgtatattttgtatatttacctgacccttgggcaggaatgttccaaacaataaaacgcagtcaatcaactccaactgattaatacacaccacgcactgttatacattaaaacacatcttacctgtcaacatgtcttgccaccctccccaagatcagtttcactcatccctgattgcctcaaagtcaatcagtgacccatccaattgcatgtataaagtcaatcctgagtagaattataactctacctcccatgtatatcccatttttattggaagtgaaacaacagcccaattctctctctgggtttgtgccctgcccttgctagactgacgccttagcacacacagatgtcttcttagttttactgacagaggaaaaaacacctttctaaaagatgaaagccacgcatcacccattacttccaagttaggaatattcaacagattctttttttctttttatgagacagggtcttgcactgccgcccagtggcacaatcttggctcactgcaacctctacctcctgagttcaagtgattcttgcgcctcagcctcccaagtagctgggattacccttgtaccagcacgcctggctaattttttggtatttttagtagagatggggtttcaccaggtaggccaggctggtcttgaactcctggcctcaagtgatacacctgcctcagcctctctaagtgctgggattacaggcgtgagccactgccactggtccttcaacagattgattctaattagccaatcaaagacaaggatccatcacatctaggcatggctttgagcttcacaggccagaagctgctctgtcagtaactcagaggggatatggtccctagacccaattcacttttaataaatcagggtgccagtcctttaattttggaagataaataaaattgcgaagtagatgggatacttacgtcaacaagttggttgggtttcatcctgtaagagtattgtgtacagaaatccaatttgctttgggagcgtggactttgaaagcagcagtactgagtgagatggccttaatgatggatgataatgaggttgatgctttcgtagccacgtttccatctgaaaaccacgtgaagagtgtcagatcatcttcatgtccgttgcatggcgcatttctcctgcggagtgtttgacaccttctgggcttagtgctgactgtccctcctgttgacatcatcgtgatggtagccacctctggttttaccagtactttattgcatctactgaaagagcaacgtgtatagggaagtaaaacaatagttagtccccatttgtattgacattgtggatcccatcaactatagccagcagtggtctctgctcccagagcttaccttcagttgtaacaaacatctacagcttcactttgctttccttctctgtatctccttcaccaatgtgtacatattcatgtcacatgctctttaacgtttctaagacacaacaatacccattattaatctcttactcaggcagtgttaattccaataagactgcaaggcagcagtgcctccagagcctgcactgtgccgggaattggcactgggattgcaagcaccgtggtcattgctaccaagggaggcacagaatcccttcaccccatagtcacgggagcattggcaacaaaatttaccatgccttggcaatttatgctgaccctcacattttggcattaaaaaaaagtatcatcttagagtaccaaatatgtgtcttcttatagatgtgtgccacgggcctcgcagtgaacatcacagctctgcagatgcacaaaccttgtctttatgagtctatatattaaataaaagtggtagaattttggatgggtgcaagtcaagtaatgggataaaagaatgatgatcgaaggagatgattcatgataactatgtgcccttatgtgaaacctagcaacaatttcttacttatgataaaggcacaatctccccagtccagaatctaaatggcattatattaacattttcctataccactaattaaacataatgctacattcattttattttcttctgcctcattctataacagctatgaaaccatttgttatagctaattcgtagaagccaggctaaatgagccctaatcaactagaacaagcattcagaactcaaaatccatttacatgttaattaagtaaatagtataagctacacgttgagcctacaactcttgctggagtctccagctgtaagagccttaactccttcctttcataaaggccaagaaaagagtgagttagtccctattcggggagtgttggttggttctcccaatcctgttaggggcagttggcactcttgactttgaacggcccccaagagtttcactgccttggtggagtccaagtgggcatcatgggcaatagcaacagatcccacaatactcaaatacaaaaggctacctgagataatgcggtcaggaatgggtgtaacagtgtatgttaatttaatgtcaaatacataatgtatggagaagatgtacgtgaggctggaagaacaggactgacagtgtgcttttgttacttctcaatctctaagagacagctaccttgtccaactggttctcatctgctgacatggaggatgagcagataggccttctcttaacatgcaacccctctcctggtgaaaaagagcttctcgttataattcccccaattgtcagcaaccctgattccccatcacctcaactctcacttcccaacactttccctcagggaaataatgagaacagcaacttcctacagcagtgaagctgacttcggagaggactgggaaaggaatggaacgtatcctctatcactcataattatattcctactctactacagggaaagggaatgcaactgtttgttttctctgacttttttgctaaccctttattattccagaacaattttccatgtagtagaaaagagaatcttagcctactctgggagaagctgggactgagggtagggtcagcaccagcgatgtatgatgctaatgcttttacacaaagtatgaataagcacacaagaaatggccagtgcctctcagaagtgaacacggagaagcagcagcatagacttgggttaaagcagtgttaagggattaatgtcaatttaatagttgtgatactgtactgagtgaagactatgcagggtctctttgtattaattctttttttttttttttttttttttttgagacagagtctcgctctgttgcccaggctggaatgcagtggcactatctccactcactgcaggcttcgccaagctccgcctcccaggttcacgccattctcctgcctcagcctcctgagtagctgggattacaagcacccgccacacaccggctaatttttttcgattttttagtagacacggggtttctctgtgttagccaggatggtctcgatctcctgacctcatgatccgcctgccttggcctcccaaagtgctgggattacaggcgtgaggcaccgcgcccggcctctattaaatctttcaactgcatgtaaatctacaattgtctcaaagaaaagatttttaattttttttcttttttattatactttaagttctagggtacatgtgcacaacgtgcaggtttgttacataggtatacatgtgccatgttgtttgctgcacccataaactcgtcatttacattaggtatttctcctgatgctttccctcccccaaccccccacccccccaacaggccctggtgtgtgatgttccccgccctgtgtccaagtgttctcattgttcaatttccacctatgagtgagaacatgcagagtttggttttctgtccttgtgatagtctgctgagaatgatggtttccagcttcatccatgtccctacaaaggacgtgaactcatccttttttatggctgcatagtatttcatggtgtatatgtgccacattttcttaatccagtctatcattgatggacatttgggttggtgtcaagtctttgctattgaaaagattttaaaaagcccacataaaaaaatgaatataggaagccaggcatggtggctcaagcctgtaatcccagcactttgggaggccgaggtgggcagatcacctgaggtcaggagttcaagaccaacgtagtcaacatggcgaaaccctgtctctactaaaaatacaaaaattagctgggcatggtggcgtgcacatataatctcacctactcgcgaggccgaagcactggaatcacttgaacctgggaagcgtacattgcagtgagccaaaatagtgccactgcactccagcctgggcgacagagtgagacttggtgtcaaaaaaagaaaaaaataatgataatataggaatattgatttttcagtttgcctaagagttctaaccttgtctctttacttgactcagagattggaagatttggaaatctcagtttgagaaaatttcctttacatccctctctagcaatgggatattagtaagagatctaaccaatcaagatgctcaccaagtagaagagttttagagcactgagacctgaaacacatcttcaataagccgcatctagtttcatggaagataaaaatatctcaagagagagttcaaatgcttatgtttacattttctatttttctcaatagcataatttcttccttcctaatctactgaaacttctaaaaacatcagcaaaaaacctgtttcacattaattactattatcactcagtggaaatttataaatcagccactaaatgtagaggatgcaaaattagaccttatataactaaacccaaataagattcctgtgaaaattaaaaccgtatcttcaaaatgtatactatatgtaattattatgtcaattaaaaataaagttgaaaagaaaacaaatttaagaaaaaacaaaaaactcttcatctgccttctttgttctcttctcaaaatgtaaaatactgagaaaactaacattttgaaatcatttttgaaatcaaacttattttttgatttccaatccacctttctgttcaaagtaaatatcagagataataatggagaaaatttgttcagaaaaataaaagcaagaatatttcctaaagagaaatgttagaaacataggcaaagacttacatggctatctaaggaaccacaatcctttattgatgttgaatttcttacactttcaagatcacaaatagcttttctgatattcacttatctgaattctgctggcaaggaagcattatgccttcttttgtaacaactctgctcactcttcaagacaaaatgccatttactacactgaaatgctggtgtatacgaaacacaaagcaaaatcatgtgcttctaataaaactccacgcattttatctttgtaaggtaggcccttgctgagatttgtgctcgtgtcaacgctacattccattttctaaaaatcagtataacacaaaataatacagaatctaagccagagctccctggattatacaaaatgattatgcaattcattgttcaaaaaataatgctcaaccacaaaaaattagttctgaatagatatttcaaattggagtgaaattctttgtggacaaccaaggttagaaagctgattttacatattttaataaatttagaatgaacacagttgtgaaactggcaaccagaatggggagaaaatctccactttcaaatgtacgataattataatgccttcttatgaagcaaagttaacagattagcaaataattcgctgtaaataaagtggtaaataaagaataaagctggttttagaataaagcaaagctggttattattatttcatttttaatcattgaatttcaagtattctcagcctactggaatgtatgtgaaataaaactatattccatgtgatgtataaattttaaatttacaaattttgggaaagcagtcacaatcaaactagtcatttagagagagctaggaactatattttctgaacttttttttaaaaggcaacattttatagcattattttctccatactctacaagaatatctacttaaacttcacataatacaactatttctcctttctgacagaaattccctatcttgaactctttttctccaattttaagtagagtaaaaagggcaaatgtaagacaaatataatttatttttgtaataagttacttccttaatgtaacagtggaataaaatgaaaacgacataaatattaaaatccactaagtatacaaaacttcaatatttcaaataaacgttataatttataaatataattataatatattagattataatatattatataaaaactttataatttataaatataatttatgtattatatttataaattatatattatatactatatattacaatatataattatataatacaatatacaatttatatacattttatataaatgtttacataatacatatatctgtctgagctcaatgtagttcataacaactttatttttttagcctaagttattgctgtaattctaagtattactacgtggtgacatttcatgagcctaagttattaaaatcaaacttgtattctgttgaaaaataagcagacaatatttgcatttgattctactgatgaaaaaattttaaaagccaacacaatagaaaactggttattttttaagaacgtgattttcccaattctggaaccatgtacttttaatagaaaagaacatttttcaagtgcttgtacgtagtggcaagcagtcgtcaaaaaacatgtttagaaaattactctaataaggcaataaattatcaaatatttatgacctagtaatcatattttactaaatagaagcatgtaaaattaggcaagcaagcttgaactgaagtcttatgacaaatctcacttaagctccaaatatggattgaaatacaaacaaagatgatgcaaacagctgtgcatgctaatgaaagcactgcttcagtacaagaggatggtgctaatttgtcacggaagtaactagaagatatccgcagttggctagcctttttactgaattgcgttaattctctcaggctagccaatacatctgtcattctaattatacctgacccaattctcatctctccatgatgaaagattgtttataaaatgccacctgaaggagatttacttgtaaagtatttagactaatcaggactcccgtgacggtgttagggaacactcacaaaagggtaccactgtggtttttcctcaacctttgtttcctgtttgttatgggaataaacttgctcttcactgagctgcgtggttagcgtgcaacaggctattaacaagaagctcaaaactcgggatatcatgtcctgtattggaaaataaggggaagtgctttgtcttactgaatgagagacaggagtatgctgggaaactggcactgtctagaaaaacaaacaaatagaacactcttgagttacagtgtatgccaactgccatggtataaatactcccaccattggtatttcaagctactaatggctatggcttacaaaattcctctatactgtaataattagcttttacaggctagcaggagttggctacactaccatgttaatgacaggaaataggggcacaagtgaacacatgtagggagactgtaagagtttttcggtttccttggtcttgaggtgtgaatttaaggaaagaaaagctcagtaggtagatgtctcaggattgcctcatacttgttggtatctgtaatataccaagaacaataacaccaaaggtaagaatggttttccttttcagtttcttacttcctgtctcaatgctgcaaatctgcaccatatggaaggcaggagacgctactagagtctactactcaaaataggatcatggaccagcagagtcaacaccacctgggactcaggccccccatacagactcaacaacgattgttttccaagggccttggataactcgaatggatatctcagtttgagaagcagcatgatcaaccttatcttttaaatgcaatagatatgtcaaaacgtgagacataagatttaatcattttccaaaagaagtagttagggaagaattagtaaaagttgcataggttttggcttattaaaagaagtacacatatatttgggaaaagacagatacaacaaaattagtagtcttaagattcaaatatacagctcaacaacttaatttgaacagattgaacagattgtctatacacatttattttactctgaagttctgtcctatctcaagcaacattaaaacagcttcgatacctctgccttagatccagtaccaagatcataattttcttactcatattaagactattgaaataccagacttcttagaaagctgaattcaagtggtatcattcctataatatcccagaacatcagaaatatcaaagtttttatttttacttgtaaaaataatgaagaaagccaagatcaattcaagggcttagaatatacttcctttttcttttcttttctttttttttttttgagacgaatctcgctctgtcacccaggctagagtacaatggagtgaactcggcttactgcaacctccgtctcccgggttcaagcgattctcctgcttcagcctcccgagtagctgggaccacaggtgtgtgccaccacgcccggctaatttttgtatttttagtagcgaggggtttcaccatgttggccaggctggtctcaaactcctgacctcaggtgatgcacccacctcggcctcccaaagtgctgggattacagcatgagccatcgtgcctggccagaatgtacttccttataccacttctctgtaaagaaagaattagatgatatttctgttccggtttaaaaaaaaaaaaagaaaaaaagaatgcctctagatgtaggtcatgggttggaaggatggtcctactgtttcatgtccttttctggggaagactgacatgtacacctctccatgttaactggcttcttgtcacaatctctagcaggcaaacaacctacagattccagctgggaacagcagtgtctctggttacagcacagatgctaatcaccatttgctattttataacagtggacaaggggagagtgaattccttttgaacaaaaaaaaaaaaaaacaaaacaaaactaggaaagcagtttacctccatatctcactgtctacatggcaaatatgcatacgcaatgtttcaagtcaacattttatgttgttttctgtttctaaataaagctactagactacattacacattttatcaaatacttgcttttaccttactaaatgtgtatttatcatatttgctttggcatatttttgtttattttactttttcttatacaataaaaaatgttcactggttatctacaatgtgcaaagcagtgatacagaagttagagcttacattaaaatgagaccagccgggcttggtggctcatgcctgtaaacccagcactttgggaggccgagatggatggatcacttgaggtcagcagttcaagatcagcctggctaacatggtgaaaccctgtctctactaaaactacaaaaaaaaaaaatatattagccgggcgcagtggcaggtgcctgtaatcccagctacttgggaggctgaggcaagagaatcgcttgaacctgggcagcagaggttgcagtgagccaagactgtgccactgccttccagcctgggtgacagagtgagacttcgtctcaaaaaaaaaaaaaaaaaaaaaagcaaaaaacaacaaaacaaaaaaaacacacaaaacttagctggtcttggtgaggcacacctgtaatcccaggtactcggagacagaggcaggtgaatcgcttgaaccatggaggcagagattgcagtgaactgagatcgtgtcactgcactccagcctgggcgacagcaagactccgtctttgggggatgagacacagtattgcacgggtatttctctgttcacttttttatttttatttatttatttttgagacggcatctcagtctgtctgccgagactggagtgcaatggcacgatctcagctcactgcaacctcaacctcccaggttcaagtgatttctttgcctcagcctcccaagtagctgggattataggcacccatcatcatgcccggctaatttttatatttttagtagagacggggtttcaccatgttggccaggttggcctcaaactcctgatctcaagtaatccgcccacctcagcctcccaaagtgctggggttacaagtgtgagccaccacgcctgggcttctgttcacatatctaaagctgctcatcactgcagatctcaacaccatagcccagtgttttgcaaccagagagagtctatcccctactcctcccaggggacatttttgattgtcatcacttgggggtgctgctggcatcgagtagaggctagtgatgcagctaaacatcctacaatgcacaggacaatcatccgcaacaattatctggcccaaaacatcaatagtactaaggtccagaaaccctgccatagcccaagcaaacaccagaaggattcgtgatgcattttagtaactttgcccaccaagactactgggcagcagtcaccagcacttcagaaatcctgggtaacaaatgctagtaaatttccagaacagatgcaatcataagaattggcaagcaagacttttctttgctcctatcatgaaacataagaacctaaagtcacgtgcaagcaacataaaattgccatccatattctgtgatacttgcatattctgtctagaaattatacccaataagaacatatataaatttaagaaagaggcaaccctactctcatagttaaaacacctgaacagtcttaccattattatcaactaaatatagcgtaacctttaacatttcctctgccttaatcttttttttttttggacagggtctcactgtcaccaaggctggagtgtggtggtgtgatcacggctcactgcaggcttgacctcacctgggctccagcgaccctcccacctcagcctcctgagtagctgggactataagcctgtgacactacagccaaaacaacaatttttttttttggtctccctatggggcccaggctgcttgcaaactcctggggtcaggcgatcatcctgcctcagcttcccaaagtgctgggataacaggtgtgagataccatgcctggcctgtaaacacttttttttttttaacactgtaaaagtctcaatgtttacaatttgggctgctgtcttgaaaattaagggattctcttgagcatcatttttatatgagattcattcattcttgcctccccttgactttttactcttctactaacagaatcacaaaaagtcaggcatattggaagaggtggttggaaaccaaagatgaattttcaggagggcaaaatggttaaaggctgagagaagcagctggttaggctgtaagccactctgcttttggaaactcattgttctgcaagggaactaaagatctccattcaaatccacagctttgtaacctgctcaaggaatctgactgtacttaatcagacctatggcttggctaaaaacgtgtgcccggttgggtgtggtggctcaaaccagtaacccagcactttgggaggccaaggtgggtgaatcacctgaggtcagaagttcgagaccagtctggccaacgtggtgaaacccatctctaccaaaaatacaaaaattagccaggtgtggttgcacacacctgtagtcccagctacttgggaagctgaggcaggagaattgagaattgcttgaacctgggagacggaggttgcagtgagccaagatcgtgccactgaatcccagcctgggtgactgagactccatgtcaacaaaacaaaacaaaacaaaacaaaacaaaacaaaacaaacaaacaaaaaggtgcacccagctggtgcagtggctcacacctgtaatgctagcactttaggaggccaaggcaggtggatcacctgaggtcaggagttcaagaccagcctggccaacatggtgaaaacctgtctctactaaaaatacaacagttagccaggcgcggttgtgtgcgcctgtaatcccagctactcaggaggctgagagaggagactcacttgaacccgggaggcagaggttgcagtgagccgagatcgcgccattgcactccagcctgggcgacaaacaaaaactccatcttaaaaacaaaacaaaacaaaaaaagtgtgcccatgtaaatgtatgcatgtttaaatgaacctgaacctctgagttgctggatttcttctttgaggtttgatttttttttttcttaattgcaaattcttgagttgagtacagttattgtgcctgaggcatctgcacacttttttttttttaaagcaactgatttggggaaaatatgagaaagactaatattctttaaaaatctagtttctggcctttaattaaattggactaaaattttatttttaataaatctagatataattgtattaaaatgcctttcactgattacttctgctattctatttttttttaattggtaaagccaggttctcactatgttgcccaggctggtgtcaaatgtgtatctttgtgaatatactaaaccactgaattctctctcacacacacttctatatggctctattccctagtctcatcacattttaagcaacctaattatctgagtgggctttctagattgagaccattaaactacacggaaagatgcttgtccatgtcctgcttcactctgcctctatcaaagtgtgtatcaaacacctcggaatcaatggctgccatgacatggggcacaaaataacaggctgttacctgtcacatctatggtcagtgctgacactagttctcttgacatcattagcaagcatgctacaacccgggcgagagtagaagtgcatcctctccatcttcaaaacacaaaggtaaaggcctgaggcttgctctataaggaggagccattacccttttgccctgttcccaaatactccctggagctttagtttcatttttgtacagcatgctactactgaggcctccaactgaagtatgtgagttcatgttcgggttcacagcaagttaagttcacagtttaccccaagctttgtggagagttaaatattaatcataagtaaaaatcccgttagtgaattataggataccttgtaagtgtcatgtccattacaaacaagtaacaacagaggcatgagaattaagctaagctttgtttcttctccccttgagatcaatacaagctactctgatttacttcaagtatgtattgcattcattctatttggtgctctatcacccagtaaatccctattcttcctttataattactgatacgccaacttctctgcaacatagtaggtgaaaacttttgttccgggctgagcactttctcttctccatgctgccaaaattccttcctaggcaggcctgagagactcatccctctcaaggacaatgcagatatggctagaagcaacctgagcaagccactttgttcctatctctgtgcccccagcaaccaatgccatgtctggtacctacaagtgccttgtggatattggtgaaatgtatagcaataaatcaaatggtacttctcccagattaattgtcaccagaagaagaaaaataatttaattctgccaaggtcaatcacttagcccaatataagcaatattcggatcaaaccttttagcttttatcatcacatgagacggtgaaagagccatctgtatcagtgtctctatctgttcacttaacagaagaactcccacaaggcttaaaatacctgcaagaaataaaactctatcttgaaatgcagtggcatctaatactatcttatccaattttcagctggatttaaaatttaagtgcagatatttcaatatacagtgtatattcacacaaaaaaaatttaagcaagaaatgtttcttttaatcataacataatgttctctctaaatatcagctttattataccaatagatatggataggttacatttatgccttttataattaaaagtcaacttattggtttacctttaacattcctcattagtagtaaacattagtttgctaatgtttcaaatgcaatggaggatcggaatgatgatataaccataactaagagagcaactaaggttaattgagcagttactgtataccaggaattatgcaaagtgtttcctataaattaattaatttaatcctcacaaaatagttaaatattggataggtcttattaatccctattttacaaaaagaagcaatgaggattcaaggttatttgatttatacaaatttacacagttagtagcttgtaaggcaaagatttgaatctggacagcttgagtttgtaaattgaacacttactgggcatgatggtaagcgtttaacataagttacctaaagtcattcttacaagaaacatgcaagataacattaccatctacactacacacataaaaaacaggttacttaactggcccaaggtcataaaaattctctcaaacactatactagtctatctctaaccaaaaaaaaacaaaccctacctcaaaagaaatcaacttgatatggcagtatgtgaaatagaaagaacttcacagtcaccgtcttatagtgagaatcaggggttagcaaatggtttactgaaaaggccagatagtaaatgttttcagttttgcaggcaaaacaatctcttttgcgatcctcaactctacttccaaaacatgaaaacatccatagacaatttttaaacaaatgggatgggctgtgcctaataaaacttttgtgtagaaaacaggaaaacaggctatttttggccccaatttgctgacccttgatcattactcttatttgtggacccccgatcatttttctattttttttttttgagacggagtctcgctcttgtcgccaggctggagtgcagtggcgcaatctcagctcactgcaacctccgcatcccaggtccaagcaattcccctgccttggccacctgagtagctgggattatgggcacgcgccaccatgcctagctaatttttttgtatttttagtgaagacggggtttcaccatgttggccaggctggtctctaactcctgacctcaggtgatctgctcacctcagcctcccaaagtgctgggattacaggcgtgagccacagcgccagcctgatcacttcaagtaaaaattctaaaaattcagaaatgcacagtgtaaaataatagatgaatatatgcctatatcaaaggtatatgcatttacaagggaacacaggttgaaatgaatttgtgtgtatttataaagaaaataaaaagtgtaattttgacatgagtgtagcagaaatatcctggcctatctaggtccaaattctgatttcatcacttaaccagttatgtgacccaggacaatttattttattctttttttgagacgaagtttcgctctgttgcccaggctggagtgcagtggcacaatctcagctcactgcaacctccgcctcctaggttcaagcgattctcctgcctcagcctcctgtgtagctaggattacaggcgcatgccaccacacctggctaatttttgtatctttagtacagatggggtttcaccgtgttagccaggatggccttaatctcctgacctcgttatccgcctgcctcggcctcccaaggtgctgggattataggcatgagccattgcgcccagcccaggccaattaaaaaaatttttttcggccacgcatggtggcctgtattcccagcactttgtggggggcggggggcggggggcggggggtgccgccaaggtgggcagatcatgaggtcaggaaatcgagaccatcctggctaacatggtgaaaccctgactctactaaaaatacaaaaaaattagccgggcatcgtggcaggcacctgtagtcccagctactcgggaggctgaagcgggagaatggtgtgaacccgggaggccgagcttgcagtgagccaagatcgcaccactacactccagcctgggtgacagagcgagactgtatctcaaaaaaaaaaaaaaaaaaaattcttggccttagagatcttggctttaaacggggaagtaaaatttccaccacacagcatagttacaaggtttaaagacagagaatcactgctttaaagcacaagaggcctgttttcccggctacttgggaggctgaggtttgaactcaggagtttgaatccagcctaggaaacatagcaaaatcccgtgtcaaaaaaaaaaaaaaaaaaatttaaattacattaaagggcaagagtggtgaccgtgaaaatctatatctgcaacaaaggcttcaaaaatctgccagtctcccaggaggtaaaatgctgtctgctctgccccaacgatgccttccacagtagcaaagagcctagccatcagcaggggtacaacgaatagttgctgaataaatggaacataaggaagaaatgtccagttcctctggacagggcacaattggctagattaaataaaagattatgccatttattacaatacccatttcaatcagaatttagaatttatggctcaatcaaaactaccctgatatctctggtttctgaagtacaatcccttcttgaagaacagaaaattaggagcaagtatctaaatacaccactgttgtactcaaatcggtaatggcttattccactagaccaataaccaataatatccaagtatttttttaacaaccaaagatgacaataagcccccaaaaccagatagatcttgcaatcgtgtgctcacttttatttttatttttttgagacagggtcccactctgttgcccaggctggagtgcagcgaatgtgcttacttttaaacaataattttattctactggaatcagtgacagagaacagacatcttctcatttgggtatcatcgattctaacacaatatggcagagaagattatgactacgctaaaagtgtcttatttttcttccctccatttctttccggttttaacgggttatgaaattattgagttttttatgaagcacattaaggactggtatcagtagcaatatgttggtaatgatgacaattttcttagaaaggatggctgtaaatcacattttgttccaggtactgaaacactaacactgaaaacaagattgtaagcctccctgcagtatctcatctttgcaagtcacttctaatttttatgttgaacacagaagcaacctacttgtaattagagttttacaaaatgagtaatcacctatggcgttgccattgctctcaattagggaagaaccacaagtcaccttttgtaacagtgaggaggaggaaaaggactctttgcagctgacccctttaacgttaccctctaaaacatctacttctttactggaattagctacaagcacaaaaaaattatctcgcatgggcacaactgaccataacatgtttctgttaggccccctttcccaggaagacttgcctcaattagagcttttgttcaggagtttgaggtggaatgaatggacctgcattaaagattcctctatttctggggcattaacagttgctatctctcaatgaccaggtatcttgctttcagaaggttgcttttgttgctcttcttgccaacaaaattattaacttgttattttttaaggttcatttcttttttgcctttagcctggagtgttttgtttatgaaattcttttaactgccttcgtctttctacaggaaataaaacaatacaacatctctgtgttccgtcttaatatcaaataatactacctgcaaaactcaagcaaaaagaactggactaatgcagacgataatgagaccaatttatctcaagcaaattgtcttgttctagaatatgggcctaagtttatgtggcatcctctcattgtactgcataactgatgtcactccttgttcacctgttacctcaacagtactagcatcaaaacaaaatctctttattgtctcctggaaaaatctgcagcgcacagtagcttctgaattaatatttgttaattaatcacctgcagttaatgcccatctttgccagcctggcattgaaggtctctatattttggtcccaacctaaaagacatctgctctagcttaaattggaccaatcctgtctcctaaatatgcctttccatggcaccacatttgttttgctagtcctgatgactctacagcaaaatccactggtagacacaccacccacccacacttttggctctagttcaaatgtcatgctctccatggaaccttctctgatcaatccagaagttccctcttactctcggaggcaggttctgtgttcacatttcttacaacacagatggctttgtacttctttgacttctatttcctaagagattttaacatccactagggttagctggtctgtgtgtgctcatcatccattccacatggcctagcaaaatggcttgtaccaagcaggtgctcaaaatctaatgtttcaagtaaaatgggacactaaactggttctattaaacagcccagcttgatggagattcaccaaggactttcagtcccactgcaggctgctagctgctgtaatttgtattcacacttcatttaggtttcgagaagagaagccctgaaaagctgtccttccctgctacaggcatcaggctaacaagttcatttgaccagatctgccatagttggtcctaacagttgtatgaaaaacaccctgagaaagcatgtctcagtatttgaaaaatggtggtttaaacaaaatgcgcatttactagcacatttacttatgtgctaaagtgagtaagaaactgtcattaagtagggaatgataaacttaatccatcttgcactctgttcttttttttcaaagaacatgtaaaactttcaataaattttaagctaacgctgagtgtttaattcagaataatctcaattttaaaagctcaagttaaagaaatgtagaacctcaaaaatactgtgttaagtgaaagaagtcggacacaaaagaccatgtattatatgatcccacttataataacagtccaaaaaagggcaaatctatagagacagaaagtagattagttgttgcttggggctagaggtgagtagagggcttaactgggagtgagtatgtgtgatcttactggagtgacgaaaatgttctaagattagattatggtgatagttgcacagcttggcaaatttcttaaagccgctgaattatatacttaaaagcaaatgaaacttatatgtaaattacaccttaataaggtaaaaaatgcaacaaagggaagaaaatactatagtgacaactatgaatatagttgagggagacaaaatagcccatgttaagctctaatagaacaataaatctgaaatcattaaactttagcaaaaagtgagagaaagccactttttgtaaatgctgtaacatttgtggttgacctttataagtatttgcagtacattaaaattcagtcaagtacatattcattcaatctagctctagaagcatcttttactatctgccaagcagatggcagatatgaaatgcagaactctttaaggaacaaatgcatactctttaaggaactcaatccaacagtttactcgtttctgtaacatttggtcatttaatatcaactgaatgtttgtttttatttcatggagacaagtatgacctttagttcttttagttcacaatatttgcaacacaaacattaattcaatagagaaagtctaagacattaatactatatttacttcttgaagaaagcactgccgtacttcccaataaaacaatgtaaactcaacataaatcacctctgttaaaattcatagcataaaataatgcgatactcaccaaatctttttttttttttttttttttgagacaatcttgctctgtcacccaggctggagtgcaatggtgtgatctcagctcactgcaacctccgcctcctgggttcaagcaattctcctgtctcagcctcccaaatagctgggattacaggtgcgtgccaccacgcctggctcatttttgtatttttagtagagatgggttttcaccatgttggccagactggtcttgaactcctggcctcaggtgatccgcctgcctcggcctcccaaagtgctgggattacaggtgtgaggcactgtgcctggcccaaatctccttctttaatgaaatctaatcacaactactcactcaactaagatttatcgaaactacaagccaggcactctgtgcaatactgaataaaatcaagtccttaccctcaaggagctcatcgtctaggtggtaacagacaatattatataacaaacactcactgccaaaggaataccaaggagtcacctaactcagtgtttgtcaaattagatgactacctggttgggcggagtcttgtagaattaacttgggatttgccaagcagcatatacaaggtacaaaacaaactgtataataaagatttcacattatttgaaattgtttgcttgttaaaccaaaaaaatttcacaagcataagaagccttttggaaaaaaaaacatgtttttgattggggaaggcagtggtgctagggtggatatttccaactctggtattacgctttcttttccttgggggtggggggaatccaagcaaatggtggattacctcgaaccacctcttccacagactctgtggtggtggtggtggtggtggcaatgctggtggttctctctgtggcttcttcgtagggttcctcagcctcttcctctacctcatcaccatcctcatcgtcctcgtcatcatcggcttcttcttcttccacctcagccacttcttcctcctctgctacttctactactttgtcttcactgtgaaggcaaacacaaataacagaaaaagtcaattaaacacatttcagggaaggaaaagaaaagtcgtccatatggaattttggcaatttgagaagaaacacacccaaaacttcaattcagcaggtctaagtataaatcccagctcagtgggtctgcaaaaatttttatccttggggacagttcttagtttctgcagttgctaaaaggggatgccatgagtctaaccacaggacattctggaaaagggaaaattacggagacaataaaaagatcagcggttgccagtggttcagggggagtggggaagggatgaataggtggagtagagaggatttttagaaactactctgcacgatactgtcataagtaataatagatacacagcattaagcatttgtcaaaaccaagagactatactacacaaaaagtcgcctctcatgttaaaacaggaatactggttaataatagtgtatcgatattggttcaaacgtaccatactaaggcaaaatgttaatccaggggaaactgttggggagtggggaagtgagaggtagagggaactttttgtagtttctgcttgaattctttgtaaacctaaaactgctctgaaaaatgtagtccattataaaaagtggggtggtggatatcaaaactgagtttgccgtattatgggaattacttctcatagtgcacatacaagagccgcaacgcattgcacggtagcggatactcagtatatgctggtggaaattggtttaaaaactgcaactgagagcttaaactggacacacaggtggaagatgaagctgacttaagtaaacctgcaatgccctgtggtcagggatgcctgctggaactcacacaggtggaagatgaaactgacttaagtaaacctgcaatgccctgtggtcagggatgcctgctggaactcacacaggtggaagatgaaactgacttaagtaaacctgcaatgccctgtggtcagggatgcctgctggaactcacacaggtggaagatgaaactgacttaagtaaatctgcaatgccctgtggtcagggatgcctgctggaactatttagttgcgtaccctatggttactaactgcttatgttttgtagaaaaccaaatatttcagtggttctcaaatttcagtgagcatcagaatcacctggaaggcttattgaaacacagatcacctacctgctaaatgtggtggctcatgcctgtaatcccagcactgtggaaggctgaggtgggaaaaaacctagaggccaggagtttgagaccagcctgggccacacggtgagaccctgtctccaaaaaaattaaaaaaaaaaaaaaaaaaaagccaggcatggtggtgtgcacctgtagttccagctactcagaaggctggggcgggaggattgcttgagcccaggagttcgaggctgctgtgagctatgactgcatcactgcattccagctagggagacaaagacactgcctccttaaaaacaaacaaaaaccagccaggcatggtggtgtgcacctgtagttccagctactcagaaggctggggcgggaggattgcttgagcccaggagttcgaggctgctgtgagctatgactgcatcactgcattccagccagggagacaaagacactgtctccttaaaaacaaacaaaaaccaacacagatcaccaggtgcctgtggcagtttctaatgcagctccagagtttctgaatcatgaggccttggtggggcctgagaatgtgcatttcaaattcccaggtaatactgatgctggtggtcaggggaaaatattctgagatccactgcaatatgctgagaataatggcaagagataaccagtaactcagtgaaattgggaagaggatcagaaatatttatggtattaaacatttacatgctgatgcatcatagtttgtaaaaaataagcaaatttggatggcaaaagaagggcatgtctagaacaaaattaaaaaggcctattaggaaatccttgtggaaatcatgtacctgtcaaggcaggcatggttgacagcatttgaatatctaatagtaaaagcctatcgtataccacctagcaggactagaggaatagatgtccttgatcagatcacaaaaccaatacaggagaaagacctagatgtggcagggggtttcaacctttctggggcaactaccacaggtctattcgagaagtaccatagtaatagaattaaaagctgctatgctgacattataatgtacccagaaggaaaaaaaaaagcgagagggagaaagcagaagggaattattaccacagagctgattctggccaacaaggagaagctcatcattgggaaaagtgataggaacccgggatttgtagccacaggaagccttggactcgtagtgagagcacagcattatgtaggaaatcagattccaaacacgtgagacaagcgaacactatgattccatgatctacgacaatagaaaggaagactcctccataaacctgaaaggctttcaaagtctaacaggaccgccataagtagttttgctgagagtgaaagggaaagatatgtaaagagattaatccatcaatggcaggaattctctgattacctcaggatttaaagcatgtgttacacaagttgtataaagatgtgtatgatccccatggaacacctgactctgattacgtaggatacaagaatagtataaagggcgtttataaaagtttcaaaaaaatgtgtatgacccccaagtggaacgcctttctaactctgattaaatatgatgtaaggatattaagtgaagacatccgaagaagtttagcatgtggctaaagaataaaaagaaactgattaagcagaataatttattaatagcaacttactcatatgttaataaatgaagtgttaatacagagaaaatcctaatcagttattgtaacatttccacaagactaggacgaaataggtgaaaagagaaacagaaaacactggcactgaaaatcagatgttggaagcctttatctcctcgtagaaataaatgaggtgaaataactgacttttttttttgactgcccaaattattgcacgaaagtttactacgtggggctacatttcaaaagaatccttaacagttgctcagctgccctgagcttctgcctttgcatttttctgtaggatctcactgttgtattactggtgaatcaaagaaagatgacctgatgcatgtcatcagttaatttaccgtgtttgagatctcttacttattcaatcaaatcatgggcactaactagcgctgttttccaatttaagtggaaaattcagggaaagtcaggaagaaaaatcaaaccagtattctctttaaatcatgatgtatacacgtgatcttgaaccatgactggaatgacgatgtccaagtgtaccatccagggtttggacagcaccgtgtttccaggtgggatggtgaaaacatgaccctgggtatccccaggttccttctccaggcttctttgttattacttggatgtggcccttaaagctctgaatagaaaccatgtttgtaaaaacagctgtttagtgtgatctgcattctggtatgtgtctagccgtgaaaaagagtgaattatatgcccatcatccatccctgcatctgcctgagcaatttactggcataataaccaggaacggagacacgtaataaatagttcaaccggctaaggaattaaattacttggcctaagagaactcaggtccaagttcttattaccatagctttgatttctggaattaaatttagatgtccatgaattcaattattcatttggacactatttaaaacaagagcacacggttttgtttgaataatgctgcatcttcccaaagaatgccaaacacaacaacattacaacttttaactgcagttttcatgaacagctagaaacactgaaaggaaaaaaatgacttttccaccacttcttcaaatgctggacagactgttgtcctgtggacttgttttgaaaagctcatcacagtttaaggagttgcaagggaggaacagtttatggaaatataaagctgagcatcataaaacaatttccttacaaacaatcaaataacaactcacaataaaataaacgcttggcaacatagtggaacattcataccacattcgcagactttagtggctatcaatttatagtgggtggcttttacagcttttaaacaccaataacaaacatttttacagaacaagggaaccatctgaaaatgctgaccatccccagagtatctgaatttaataaggtcaaagggacattcctacgaggaaataaatcactgatgataaaattttatgtgtcagcatgcgagattttacttggatgaaggagaaatgacatcacaaaggtgactctccttctgtttctaactaaagctgaccttgatataattccacatgcaggtgccgcctgataagtccctttacagagtgaaagattttgattcacacaccaattttcatttctgtttattaaagtcatgccaaaaaagtcaccatttgtattttctaagaaagccatatgacattctagaaatggcaaaattatagacagtaacagatcagtggcttggaaaggttaaaggcaagagagggtcgaacaggaggaacacagaggatttgggggatagtaaaagtactcagtatgacactacaatggtgggtacatgtcattagacagttttccaaactcacagaataaacaatgctgagagaatgctaatgtaaactatggactttgggtgataataatggtgtcagtgtaggttcactgattgtaacaaatcgctctaagggggacgctgataatgggagaggctgtgcaagtgtatgaacagggagtatatgggagaatctcagtaccttctgcctaattttgctgtgaacctaaaactgctctaaaacaataaagtctatatttattctttcacagtctctgttaagacggacttttttcttcttgctacagataaacagggaggaaatgacagagagaaagctctgattctcatggttatgtgaatatggactatcatgagatccaacctacttgcactgatgagggaagagggaagacaaccaatgtcagttcctgaaatgcaaccaaccaggggaaagctcagcaggaagaggttcagactcttcctctgtggatatgaaaatgggaaaaaagagtctagaggctcccagagtcagaagagagagaaaatacagtagtttttttcaagaagataaacagacggttctccttctctctgtctcaactctccaaactgccagagtctaaactggaaggtacaatggctggataagtcagtttgtccgaaaggaaagcagtttttgaaattactgctactaaattaggaaaatgtttccggggagggagggcaaagtaagaaatagccagtacttctcccgcataaaggcactgttagaagcgaaacacaaggggacacatcacctaattctatttgaattaaatatgaaaacaagcaaactgcaggcaaatagaactcaggggaaaggccagtaactggcaggggccaggagagaggattctaggggccagcaagtctctgtgttctggtccggatgctggctatctagttgtgtggtcttaaaaaactttgcttacttgcattacctcttatgtgtacttctctctaaataaatcagtaaaaaggttgaaaagggtttcttgttacttgcagctaaaggcataagcccacctggggccctaggtttaaggcctccagctttaggaagataaccacatgactggactaccaaaaattcatgactcaggcctgaggaggtggctcatgcctgtaatcccagcacgttgcggggccgaggcaggcagatcacttggggccaggagttcgagaccagcctggccaacatagtgaaattccgtctctactaaaaatacaaaaaattagctggacgtgggggtgcacgcctgtaatcccagctacttgggaggctgaggcatgagaatcacttgaactcaggaggcagaagctgcattgcactccagcctgggtgacagagtgagactctgtctcaaaaaaaaaaaaaaaaggaataaataaataaagtcatgacacagctgattaagaatgagctataaatcacaatcttgatctgaaattaggctatatcatcattcttacacatttaatgaatacttattctgagtgagacaattcacactaactgctgtatgagtaacagacatactgcagattaaacgcttcagaaattcaacagagaagtgattgttgcgaccagaggcatctgagttggccggaagtgataggtggctgtggggatgaggcaggaatatccacataatgcacaagtggaataagaagtaaataaaatataatgaaattttacacaggcactgagttttaacagtgaggaagggtaaactgcagagacacggggattcaggtattttttttctttagccaatggataaatatttgagttgaaaggcatatgtacaaattgatgataatgagcaaaaaagtggcaatgcattcattcattcatccattgaatcattccattaagtacctctctaagccaacccctagtaattcaatcaacaatattcgctgtgctttaccaagtgccagtactattccaggtagtgaagataaagcactcaatttcttggaatctatctattagttggggaggtgtaatatgagcaagaaaaaaaattatggaaaagtactatagggaaaggagatggggctaattgctaatgaatgactatgatagatgtgtgccagggatgggtagcatttcaaacagggtggtcagggaagggccccacggaagagccatgtgaactaaaaatgctgaagtcgggcacggcaaaaccaagagagtgcatggatggctgaggcaggggtaagagcaagtgcaaaggcccaggtgtgaggaagagattagcacgttcagcaaaaacaacaaagggccagtgagcttagggagtagcagatgagggaggaagtataagatctggtggtggagacagacaggcatagtgttacccagtacggttacatttcttacagcaactggaacgactcaatgagatttaagttgcaatgatgtctctggctgctgggcacagaatggtctccagggaaaacatgaatggatgctgggaagctggacactgggccaggagctaggggtacactggaaagcaaaggtggctcacaaggcaagtagccaaaggccagacactgacctcagcacctgtataaatgcaaaattactgccctgataacaattacatacagccagaagacccaaaagagtgagtgctagtgtgtctagtgaggcagagattccaggtgtctagtgaggcatgactgaaatgtgacccaaagaaggtccgaagtgaatgaagtccaggggccaaagatagctctccactaggcagggtgggtagagcatgtgcaaaggcccggtgacaggagggagggaaacctgagcacctgaaagggaattggctgacaagaacagaaagtgggctccaagaatggcaagtcagcagtggcacagagcaggtcttggcaaactgcaacccgcaacttgttcttgtacatcctgtgagctaagggtgggctttgcattttttaaaggattataaaaagaaaagaaagggggtaaaaatgacagcaatatgtgacagagattgtatgcgacctgtaaggcctaaatacggattgtaaaaatgaccatttaaagtcaaaccaacttctctcaacacatgctcctgtaaaccctgccccacttacgttagtgaattagtgaatttctaaaaaaaaattactgaaacaagcaaagagatccgagaagcactaaagcccagcttttgtgtaaaccagcagttcctgggcagaacctttaaaagacaatctctctttactctgctatctcagtacacacttagggtaacatgaatatcctagcaatagagcaacaatctaaacaatacccctgggacatgatataagacaaatccaaggagtggacagtttataggaaaactggtacagcttcttcagcaagtcagtgtcaggatataaaaagtgctattctgaatcctaagaattaaggatgtaagatgctggccctggtgccggataggatgtgaaatgcataacctgtgaaggacctttctggaactcagggagaatctgaatatggacatggtatccaatggtactaaaaatttatgttaattttgtgggtgagatggtatcatctggactctgtagaaaaatgttcttagattttagagacatatactgacatcttaaatatgcttcctatctgaacttttctttaaaatatcttggcatcataaaaagtatgtttaaagggggaaaatgatattctggcaagacttaaatttggaatataattacagtaaaaggctaaattgcttttttaaaggctatcttggaggcaagaaaagtcatatattatcaaaagcagattattgttctgacagctttatgaaccaactagaattaaggagaagcacctaaggtcataaaaagttttggagtcattttaaattcttgatatgtgaaaaagtttggttaatcagatgctaggccagaaaactgtgaacgagcaaattcctcatgtccaaaggtttagctgctactaaggatgggtgatccatatatattttgggtggagagttggaagtatatgacctttggctgtctaacaaatatttgagttccagggtctgctctggagtctagggatgctgcagagaataaagcagacaaaattccctgccttcctggtatttacattctacagggaaggaaagatataagaaaactaaaacaacgatgttacactagcacattacaaggtgacaagtgttacagagaaaatgaaagcagcaaagctaggggtgggctggggctggtagttggccgggctgttgcagtttctacagaagatggtaaaagaagatgccctgaaaaggtgtcaatgcagcaagaactatgtgcctggcatctccttccactgtgtccatacacatgagaactactacacagctataggtggtctgtgtccaaaatggctacaaagcaacctaggaaagtcacaaagtaagagaaaagcctggtccttttcttttgggggcactttgtgaagacctattccttagaaagaagagagaagctgcatgcttctgggcttctccccctcttttttgggaaaaaataattggttctgttaaggaagtgtatcagtctgttttcatgctgctgataaagacatacccaagattggggagaaaaagaggtttaatgggacttacagttccacatggctggggaggcctcagaatcatggcgggaggtgaaaggcatttcttacatggtggcggcaagagaaaaatgaggaaaaggcaagagaaaaatgaggaagaagcaaaagcagaaacccctgataaacccatgagatcttgtgagacttattcattatcgcaagaatagtacagagaagatcagcccccatgaatcaattacctcccctgggtccctccacaacatgtgggaattctgggagatataattgaagttgatatttgaatggagacacagccagtccatatcaggaagcaaaaacaacaaactctgctcctccttccagcacgctccccaaaatgcagcaataccttgtcctgccccagattcgtaagtggagccccattcctaggagaaaacagatacatctgcaccactgatcctcagtggcagaatatgccaggtatctgtccaggagaagaagccatgtggctcaggctacagggtttatagcccaaggcctcccttgcctctgtgctctgagggcttgaagtaagtagaaaagtactttaaattgtatcataaaggtaaagatgatgtagcttcttgggttagccacaacatttaggaaaagcatgttctggagaggtaagacttttagttgattttccattagtgagctaacatttttcctcttccaacaagcccactttcttgcattggtaagtattaagtatctttttttaaagtatctgtggttggttggcatctgagaaatctgtagggtcaaatatcaaatagacacccctagcacaatgccacaaatgcacaagggatgaggctatgaaatttgtgaattcttttcctttctcaaggaacgactacacttacatatactccagttaattgtatgttctagttatgtagatcctagagagaaggtctagtgtggtgattaatggtgactttccagagctcagccacgtgggtttcattctcagtgctgccacctgccagctccaatgtgactatgaacatgtcacttaggctgctgtgacttggtttcctcatctttaacatgggatggaaatattaaccacctcaggggatggtgtgaacagccaatgatgtaaataacacacttggaacagcacatgataagagttaaatactgtgcctatttactgtttttaactacagcttaaatgtatacttatgacatttcttttctttttattgctattaggttttgaaaatggtataaaaatatcatttgtttttcacaggtaatgtttttcttggggcttattattttagaaaaaaaaaaaatatatatatatatataaagagctatcctttactgggcgctatgcctagtaagttcccaactgctgactataggctcagagccctgcagagatgggatgtaaacaagcataaaacagtgttttcagtgaagtgcatattaacaataatgggctgaacaaagaatgttcattggtggagtttgggagggacagactgaagaataatctgttgaagaggtaacaggtaaactgggacatgatgaatgaatagaaatctacaaagaaggtagcaaacaggacactgtagaaacagggaatggcacccgtagcagatgaagagtgatatggtttggctgtgtcctcactcaaatctcatcttgaattgtaatcctcataatccccatgtgtctagagaaagacctggtgggacggaattggatcatgggagtggtttccccatgctgttctcgtgacagtgagggagttctcaggagatctgacagttttataaggggctgttcccactctgctcctcgctcttctctttcctgccgccttatgaagaaggatgtgtttgcttccccttctgccatgattgtaagtttcctgaggcctcctcagccatgcagaactgtgagtcaattaaacctctttcctttataaactacccagtcttggttatatctttatagcagtgtgaaaatggactcatacaaagagtgctacaggaattgccaattctcagtatggtggaggagggggtggactgcaggaagggagctgactagctgtagctctgctcttttatgaagggctttgtttcacaggctgaggagtctggaccatcatctagatgcagagcctagtagaaaagcctgaagcagaagagtggcaaggttagttgtattgcaacaaacatgagctagcagaagcatggaggacagataggtggaggagcgacagttgggatgtgaaggcggtgctcgtgaagcctactgagaacttggataaaataacagcacagaactggtgactggggatgaagggagtgagtaagaggaggaatctgatgctttgagttggagaatagttactaatggtaacagaggatacaggaggaattaagaaatggagctaatgggttcagctttgatcatggtagacttgagattctgtaagaccccgctggagaggcatacagcagacagctgaaaacaaagaacaaaaaaatctgagccactaatacacaggcactgcttttctatttccattaaataaacagtgctgcactttgttgttttttaaactaaagagctgccattcctgaaagaccacagataatagaccagatgcccactcactttctgcatggataatatgtcccactgtgataccattatttaagtagaaacaaaatctagccttatgaagtctaattataccattcctcctccttccttcccctctctctccctgcaagcataattcaagactgctttcccattcagagatctatgtgagaattttaaaacattgttgctgattagtctctctaatcaataaaagaaatctactatcggccaggcacggtggctcaggcctgtaatcccagcactctgggaggctgaggcgggcggatcttgaggacaggagatcgagaccatcctggctaacacagtgaaaccccatctctactaaaacacaaaaaatagctgggcatggtggcgggcgcctatagtcccagttacttgggaggctgaggcaggagaatggcgtgaacctgggaggcagagcctgcagtgagccaagatcatgccactgcactccagcctgggcgacagagcaagacttctcaaaaaaaaaaagaaaaagaaaaagaaaaaaagaaaagaaaaagaaatctattatcgattagatttgataaatctattattgactagagagaccaatcaggaacaatgtctaaaattgtgtatgaaaagccattcactcatcaaatgctagtggctgctaagtgtctggcattctgctggatccgaggctccaaaagggaaaaagataagctccctgtactcagagagattacattctatggggggagagaacgacaacgaaccaataaaatactaaaatgtgattcatttcagaatggaagtaaataggctgctaggattgagaataatgaagaaggggtgttttcttcagaaaagaatgatcagggccaggcatggtggctcatgcctgtaattctagcactctgggagacggaggtgggaggactgcttgagttcaggagtttgagacaagcctgggcaacaaagtgagatcttgtctccactaaaaattaaaaaaaaattagccaggtgcagcctgtagtcccagctactcaggaggatctccagagccagggaggtcaaggctacagtgagccatgatcatgccactgcactccagcctaggtgacagagcaggaccttgtctccaaaaaacagaatgatcaagggaattcattctggaaagatggcaacaaaactgaggctgaaggtgggaccttggaacatccattatagacaatgagatctgtcagcccgggggttagcaagctggggatattgacttgtgtgacactgagcaggggagagtcgggggaaagagaggcatggggtgatactgcggaggtagggaggagctgggtcaaatacactaatacctgtaaggaatgtaggaggtcaaacctgacaccaactacgtgtttgttagttgttacccgttatcaattatcctcagcatatccaaataaggcttcattgttttctctctgtgcacttggtttttaagcgtattggtaagccacgaacacaacttaaatttgggggttccaggatctgctttatgtaaataaacactctacatcctggctgctgtacagagaatggcttggtgtgggagaagaaagcagcgcatgtgtcagggagagagaacgagagcagagattagcaggatacggaaataactccagcaagaaacaatgggagtttagattagtgctggaaaagatggagataagtggataaatccagaattcataggatgtgcagaagagacgatgatgagttctaggttctcagcaataatccctaggagagggcataggaccattactgagatagaatagctttgagagaaccacattgaggactgggtagcaggggaattaagaactctcatttggacatgttaggattcatatgcctatgaaataactaggtagagtctggcctagagaaataaaccttggcctagtctacttacaaatggtatttaaagtcaagggcatggattacagcaatcaggaagagcgagccagaaagaaaaatagtataataattgtaaagagatagccagtgtcaggaatttaatggatgaaatgtcaaaacaaaacaaaatcagccaagacaggataattaaaaccacaaaggctagggtgggggtggggggtagaactggggggtgggcactcctaaagcctgcataaacaatgtgtaggaaagacaggctggaaatgacagtgacacacaggttactagacaaagggcttctgagaaatggcaaaggtaaccaattctaagaacttactaatcttaaggtgatttatagataaaagtcccatcctataaatgtctggattcttgagcccagagatattctgggtctgtctgtactggtattctgctgggcaggtaaaggggttatgaagagaagtactatcttacttgcctgtcaactaatactgatgacagagcaaaagcgtcatgcactttacagtcgtggtcatagccaaagattgcagatgtcctagacacagtatttgagacagagaatggaacatacatagccaagttactaatatacatgttgggtaagaagattcccaaatggaaggaaggtaaaaaagctctgttctagtacaaccatttgaggatagtatggagattcctcaaaaaactaaaaatagagctaccatacgatccagcaatcccactactgggcatttatctaaaggaagagaaatcagtatattaaaagaggtatctgcactcccatatttactgcagcactactcacaatagccaagatatggaataacctagatgtccaaagagactaatggatgaagaaaatgtgatgtgtgtgtgtgtgtgtatgtgtgtgtgtccgtgcgtgcatgcacgtataatgaaatactattaagccatacaaaagaataaaatcctgtcatttgaagcaacatggatggaactggaggacatatgttaagtgaaataagccaaaaacagaaagttaaacaccacatgctctcatatgcagaagctagaaaatgttgatttcatagacgtaaagagtagaacagaggatgatggaggctgggaagggtaggtagaaactgaggatagagaaagatttgttaaaggataccaaattacagctagataagaggaataagttctagtgctctacagcactgtaggatgactacagttaacagtaatatatgacataatctcaaacagctagaagcaggatattgaattttcccaacacaaagaaatgatacatgcctgagatgaatatgctgatcagtctgatctgatcactgtgtaccctgtaaatgtgtacaattattacatgtcaatttttaaaaataaaaatttttaaaaaggtaccttttaatgaacggtctatgcttaaaatgttgctaggtgtgtttcaacaccaatgagttatatctgaggttggaccataactagacgaggcacttagagatgcggtaactgtggtctcagcatcctgttccactgcacttagttccaccatcattgtattacagtaaatgcaatattgctatcctgtgactaccttgtaaacatattttcataaaaccaaagtgcttcattaccacttctgatatgtgtatgagtccttggctccaattttccaataatagtagctatacaattatgttgaaaaccatttgaggctaaccattaacattcaaatgacgtacaatgggaaacgaatgaatagtatattctaggagataaaagatcaaacctttgatatatcttctcttacttattagtagttagagtttaagatacaatatttcttctaaaaccatttcaaaaatataatttaaatataaaattgaagatcctaaaaaagtatagaagttttaaagtagaatgactttgctatttgaatacctatttaaatttctatttaaaatgtccaaaacagcccaaatcaattctaccttcatttttatagcagttttctaatcatgagacatcatactttctagtcctttttgcttccctaaaataaaaaaactcctacatatttaaattcataaataagaattatcattacttgattactaccaaaactaattttaataatgttctcaaccttatctaggatagaagtgcttaaggagccattacgtattattattgattatgattacaagacctacaataattttaaaataactaattaaaaagggaacatgttataatagccatgattatcaaaccagaggtgggagatgagtcattgagccccaaggagagtctttgtattcgacagtgtgagatgatgggtagagaagtgatttgactaagaaaaaaatcaccccagctggcgcggtgtctcacgcctgtaatcccagcactttgggagcccgaggcaggcggatcacctgaggtcaggagttcgagaccagtctggccaacgtggtgataccctgtctctactaaaaatgtaaaaactagctgggcgtggtggcaggcacccgtaatcccagctacttgggaggctgaggtaggagaattgcttgaactcaggagacggaggttgcagtgagccgagattgtgccactgcactccagtctgggcgacagagtcttaaacaaacaaacaaacaaaaaaaacatcccatgctgctggcctgctcccccaacaattccaatctacgcattttaaacaagtccactgtaaactttaccggcttgatatgcatttacaccaattagtcgttttggaagcaaataccgtgatacagattattgcaattttccccatgtttgaggtaaagaaataggctcaaaaagattatatatgagggtaaagcacattttaaacctttgaagatatttttgaagcaaagattatcttatttacttacaagtcttttctttccttgactacttggatgcgtctattacacctggtttctgtttccacccaatgtctttttaggcaggttagttctatcatcatgaaatcactgtaagtgcaatactgccctttccttcatgatgtcattcatctctttcccagtttgttatctaacacgtattaacattttagtatccaactacattaatctcatgactactagcattgaaagaactgataaaaagataaaagcaaacccttactgcctggtttgacaataagtaacagctcttcacaaaggctggcaattaggtcactaagcaaaaaatcttggaagaccaaattcgaccaacagcaaacagtggtctcaaatgtaaaagaaaacttaggttatatgctacgcttacaatagcaaattatgtatactgcttgaattactattgatctaaataaaatggtgctatgctataaagattattttcaaataatttctaatatcaaactatacttttgaatacccttggcaaatcttttccagaattacacattcctaaaacaatgagccaatccacaggcacgtgtggcctactatatgctcaacattcacttctctttaaaacaatttacatgacaaaacaaagtacaacagtgaacattcatcagttgcaccttcaaatgtctgacaacacaatcagatgatctgtgtgtcctttacttattaaattgataacaaatagaaaataaaatgtagatctgaaggaagcacttaatttttttaatttgctcaattgcaaaaaatttatttatataaatatataaaatgaattgctatattaaaagaataatacaaattaaaatactataaataataacttgactgccttacaaaatcaatttgagctactgtatttacagattgagtaatccttatccaaactgcctgggaccagaagtgtttcagatttcagatttttttcaaattttgggatatttccatacatataagatatgttggagatgggacccaagtataaacataaaattcatttatgtttcaaaaataccttatacacacagcctgaaggcaattttatacaacattttaaataatttttgtttcagaaaggaagtttgtatacattgaacacataaagtcacataattttctacgtttgctgtcatgtcagtgctcaaaacattttggattttagggcatttcagattttggattagggatgctcaacctgtattttatggtaataaaccgcatttctttaaaaatattgtacattcttggctgggcatggtagcttatgcctgtaatcccagcactttgggaggccgaggccagtggatcacttgaggtcaggaattcgagaccagcctgaccaacatggtgaaacctcgtctctactaaaaatacaaaaattagccaggcatggtggttggcacctgtaatcccagcgactcgggaggctaaggcaggagaatcgcttgaacctgggaggcagaggttgcagtgagcccaaatcacaccactgcactccagcctgggcaacagagtgagactccgtctccattaaaaaaaaaaaaaaaaagctgagtgtggaagcaggcacctgtaatcctcgggagactgaggcaggagtaccacttgaacttgggaggggaggttgcagtgagctgagattgcaccattgcactgcagcctgggtgacagagcgagactctatctcaaaacaaacaaacaaacaaacaaacaaacagtacattctagagtttaagctaatgaagactgttctcccagtatctcactccatacaaaaatatatattaaaaattcaggtgatcatggctttggctaagtggcattagtctaccacctacaattttacattgaaacactggggatactgcaaatgttacctagtaaactaaaagtgttactttgtaaacagggagggcaaaaaaggaagctagttagctcccacttgggacagattttgttcactctctacctctactcaaaggaaatagtttgaacatctctaaattattttcgtaataattgccttccttccaaaacaaacatggacttataattttgctgagttccttgtggtaagttactggtactagtttaagccacatggctcccaagtaaagccaacagtttttggcttgatatgctaatatgtagattttgaggccacagtaaaattaattaactaattaaagggttatttttccatgtcacaatggagagtcctatctaaattaggggttttacactgaagatacaaatatccagatggtttcaacaagaaattaatgtttcggtgtactattgccagagaccagttaaaatcataagaatctgtattttcttcctcttttcctactatttttaagccagggaatttgtacagtttaattaaaagatactggagggaagaaaagagtccatgcatcagtagcttaggatccttagcactgaataatccaaccctccaaataactcttacaaatgaatcctacagtatttctcattcagcaatatcctgttactggggcaacctgtgccattaggtctcagtaagcagcacagtctcattgccagatgtagctcagacagcagcaactcaagccctgcactacagaggcatctcctcttccagccatcacctgcttggaaacaaaaacagaccccactggtttggccacacatctgtaatctgcttaaggctataaaagtgttttgcttttctttttgacatacatgtagtccaagtttattcaatacaggaatcgagcatttctaaataaggacctcaaaactggcagccagttccctcaaaagaaaatgcaagtttctgctattctcctattcgtcattttcaaatgagttctcctatttcagtatagacagtcagaaagcctcacacagtcctggaagctgccaacccagcattatgacagctgcttctcaaagccatgagccatttcattaaatccactcttacttgactcatccactggcaaagatttaaagctttaatttatcttttgtatgattcactttgcggccctctaaagttgttaggttttttttccttgagcatttaatatcatttctcaaaatgcaatgcagaaaggcagctgaaagattatatattcaaaaacttgtaactccagagatacaaataaaaagatatatagtcaaatacagcctctctttctctctcacctaattttaaagacaaagtactgaatagacataaattctcatgacagcctgagctcatcaggtaaggctatgaatgtttcaacatcactagctaagtggaagaccggcatgtgcataatttattacatgattgaatgacaagttttcactaactacaaatcatgtatttgtgaaatgcaccatctataataccatctggttattattttctgagaaaagttctcagagcacaatgaccataattaaatttgcttttgactagatgtagcactgtgccacctacaaattgagcctgtgcaagcgttttatgatgactgcattgattattgttatcaagatttcaccccttggtctggcgtggtggctcatgcctgtaatctcaacactttgggaggcccaggcaggaggatcacttgaggccaggagtttgaaaacagtctgggcaacatagtgagacccctgtctctacaaaaaaaataaataaatcaaaataaattaggcaggcatggtggcaatgtgtttgtagtcttagccatttgggaggctgaggcaggaggatcacttgagcccaggagttcaaggttacactgatctatggttgcaatactgcactccagcatgtgtgacagcaagaacctgtctcctaaaaaaaaaaatcactttaatatagtatctggaacatatcaaatgctcaagaggtttagtgcccttcattacactggaggaaaaaggtgacattttgtacctctgcatgctcagatacagtttgtttttgagttggaaatatttcatacttcatcttttcttattcttacaattttcctttatttataatgtagccatccctcttctgcccatggaaataatgaaacatgggacccatcatgctatgttattagactcctgatgcaattttacttaattactgcatgtctagaatgatattccttagtttttcttttcttttcttttcttttttttttgagacagagtcttgctctgttgcccaggctgaagtgcagtggtgcgatctcagctcactgcaacctccacctcctgggttcaagcgattctctggcagtctccccagtagctgggattacaggcacatgccaccatgcctggctattttgtatttttagtagagagggggtttttccatgttggccaggctggtcttgaactcctgacatcaagagatctgccagcctcggcctcccaaagtgctgggattacaggcatgagccaccatgcctggcctagtttttcttttttaaagaccagttagttttggtgacactattaaccttaagttaacatgatgacgtaggtgtatgtgtttgatgtgaatgccaatgtgattcaactcaaatacttgttgagcacctaactacctaacttatagaaaattatgccaagtattttcctgcatcaggttgtacaggcctcataataaatgtaaattcttggtaagtaggataggctgttaacctttagaataccatcaggtcttggacacaattttacctttgagttctgagcacttctaactacttgtgggctgatattctcactttatccattcatagagaaaaagaaatttaatcgactaaaactcattctagcttgtacttaaccatgagtctgagatatggtatgaacctcgatctttttcctatattgtgttcctatgttacaaaatatttatcatccgaagaattatttcatcattagccatcaactatttaaaaactgtgctaaagaagacaaaataatatgagcatgaaagaatgatataattgcctagaaaggtgatgcaatagggaaattatcacatttttattgctgtgttcccaaagtactgcatcatctttcaagatggtttaaaaaaagtctgcatagtcccagctacttgggatgttgaggcatgaggatcacttgagcccaggagtttgcagctgtaatgcaccatactcacaccagtgaatagccactgcgctcaagtctgggcaacagagtgaggtcccatctctttaaaaagcatgataaaaagaagtctggagactcactgaatatagtcaaaaatcatcttccacatattggcaaataggaacaactgacagaaggaggcattttaccaattagataaaccagaagaagaatgaaattgatcacgtaagtaaaaccttaggctatgagccttcacatgatatcctagatgaattttctcaagctcaagaattgacaagtgagcaatgtatttctttctttctttctttcttttttgaggtggagtttcgctcttattgcccaggctggagtgtgatggtgcaatcttggctcactgcaacctctgcctccctggttcaattgattctcctgcctcagcctcccgagtagctgggattacaggcatgcgccaccacgcctagctaattttgtatttttagtagggatgggctttctccatgttggtcaggctggtctcgaactcccaacctcaggcgatcggcccacctcggcctcccaaagtgctgggattacaggcgtgagctactgcgcccggctgagcaatgtatttctaagaataaaaaggaaatatggtattctcatccacttagtcattcaacaggaaggatatcatcactcaatattatgtgacaaaaacattaaccatcattgctaaaatgatgtgacagtattccttgccattttatgatgcttatgcaacacattttatgtctgtgcaacacatttatttgataccattaggaagtggacaaatgcccaaggcaggaatctctctaaggtgattagaagagataatgcagaaaaaaagggggaaaaaaagactggcttgatcattttaatagctgtttacaaatccaaacttgaaaacattttattcctgagggaagatggctatattctctcttcaataaaattatgagctgtcaatgttttaaatatcttaaatttttacaataattaaatgaaattgcaagtataaaaaaaaaagaccaagaaatatgatgaacctaatagagatgtatttgaaatgtagaaccagtatttgtaagacggatatatttcaggttcgtgcatggcaggtgattagcagctagctgcattccaaaggataatgctcatttcagaaatccataccttcaaaactgggaaaatacagaataaacatgtgggtttaccatatttaaattcttcgtaaaattaaaatatttactatgttaactcttattaaaattgctaatagttatttctcactattcctttattcttagttctgtaaattgtttaccaaataatctaaaaatatgaaacaataataatataaacggcccactgtatctagatagtcaatggtgctggcctggttttctggtgtagttagagggcaaggtgacgtcttgccatatgtgacactccagcaatcaccagaactgatgaagtttaaactgggttcaatacggaattgtatattccaatgcacgcacacctgcatacatggccatacgcacccacacaagccaccccgagctgtattagttcatttgcatgttgccgataaaggcatacctgagactgggtaatttacagaagaaagaggtttaactggacttacagttccacatggctggggaagcctcacaatcacggtggaaggcaaggaggagcaagtcatgtcttacatgtatggcagcaggcaaagagagagaacttgtgcaggggaacccctctttttaaaaccatcagatctcgtgagacttattcacttcacaggaacagcatgggaaagacttgcccccatgattcaattgcctcccaccgagtcccttccacaacacatgggaattcaagaagagatctgggtgggaaaaaagccaaaacatatcactgccccccaaaccagagagtaacattaactaacctggccaacatggtgaaaccctgtctctactaaaaatacaaaaattagctgggtgtggtggtgaacacctgtaatcccaattactcgggaagctgagtcaggagaatcgtttgaacccaggaggcagaggttgcagtgagccaagatcacaccactgtactccagcctgggcaacaagagcaaaaacttcatcttaaaaaaaaaagaaaaagaaaaagaaaaaaaaaaactcttccaagttatacagtcttaatgaaaataagacacggtcaaaaggaatcactcctccagatcttaagcagctctttaaaaaaaaaatgttcaaagaaatagaaaaaaaaaatcatctaattatccagaaagatacatcaagttacctctcagcacacgctcaccagtgtctgcaaacctaaacctaaaagaatacatcgataattaaagattgtttcttaaaaaaaatgtgagtacctcctctgcaagaggaaaagtgtgactctacaacaattagagggtcttctaacatttcatttgctttacgaattcagcaacccccatggaccactgggttcaatcagattctgcagttccaggtgaggagcagctctgcctccagggctaggctgcctacctggctagtcttacaagttagctttccaaatgaattttcccatggaaaaaaatcttacccacgatggctggagtctgtgtattattaacattatgtacgtaattattattattaacattatgctacataatgttagtaacagtctggattatgctacattacagactgcataaataggtattttgaggtgatctgagaatatgaccattacaacactggagaaaaatatactcggtaatttacacataaatttctgaaacactacctgttttgcctatgttaaagatttacctctttttcatacctctttttcaatgaggtcataaaacagagctcatcctacaaggaatgtttctctaaatgccccattagcgatagaaaaacactcatcttctatcaaaacaagcctcattaactaccaaacaacaaaatactgtgaatcaaatattgtttccaggaaaatggtagctcgtttctccttcttcaagaattgtcacgtagcatcccctgaagatgttttaagtcaggtacgttaaacttctattctgattttacatttcaagtgtcaaaaggagggctggttcctggaacaaggaggctgccagttggcaggagcccaccttgtgtgtggatcagtgatgcaacacctttctggttttgtccacatgaaagaagccctgcccgcctgcagggctacaggaaaagaagttaaaaaataaaatggtgcaagtgacctgatatactaattatactgaatccaaaccaatttttttaaattttaaaaacaagaatagttaaaaacaataataaaaattcagtggctcagccttagaaaacattactaggttatacaaaccgtctgtcttaatggaaaaataaagagtgataagaaatttcaagtcatccaggaactacactgtccaaatatagtagtcaccagccacatgtaactatcaaacacagtgtgtggctagtatgaattgagacgtgctgttaaatgttaaaagaagtgttaagacttcttacgaaagaaagaaacataaaaaaagaatgtgaactatcttattaaatttttcatattggtcacatgatatttcagatatactggattaaataaaatgttgttaaaattaaattcacctgtttctttttactatttttaaactgtctattagaaaatgaaaaagtaaggccaggcacggtggctcaagcctgtaatcccagcactttgggaggctgaggttggtggatgacgaggtcaggagttcgagatcagcccggccaacatggtgaaaccccacctctactaaaagtacaaaaaaaaaaaaattagctgggcatgctggcacatgtctgtaatcccagctacttaggaggctgaggcaggagaatcgcttgaacccgggaggtggaggttgcagtgagccgagatcacgccactgcactccagcctgggtgacagagcgagactccatcttaaaaaaagaaaacgaaaaagtatgtggctcacattacatttgtattagacagttctttgctaaaagatgggaggctctataacagggcctatagaaaaaaaaaggcaaaaaaatttcataatgttttaagaaagtttatgaatttgtgttggtccgcattcaaagtcgtcctgggcagtgggctggataagctttctacaatatccaatcgtggaccatgaagtccttaccaaaagctatgaaaaaaaatttaaaatatacaatttactttgtctaatatttattgaggacctatgtgcaagacataccagacacataaactatagtttggattctaacagataaaaagagatatgactacaattaattggaagataagttatggtcttataagaaaaaggtaaagcaagggtagtatagcagagcaaggcacctgtaaagacttgtaaaggctgcatcttttcaggtgaacatttataaatatatagattttgacgggtcataagaagtggcactttagagttgacaaatatctttatcatacattaaccccatttgacaaaaaaaggaaaaatatttcagatggggcagaacggtgggaatgaaagcctagagaaagaaaaggtcaatggttttaggatgccaggagagtcacatacatgtataaggctgaaaatgcaggctgaagccatgtaagagacttctgaatgccctgcaagagaatttggacttttctacaggtagaataaaccatcaaatatttcctaccaactgtcaacaggattaaaaacacatagtagaaagatagtaacacatgggaaagaattatctgggaggagggtggatgaagcctgggggtgtgggggagagggagactgaaaatgcaagaaagggagaggagatgattgagagtccagcagaacataatcataaaagggaagacaggaaacaaagggatagaagaaggtacaagagttgctgaagtacaggagaaaattcaatggtttattcaacaaacacgtactgggcacctaccaaatgtcaggtaccatgttgcagaaattcacaatggatgacggtggaggggtcatctgtagagcatgagagagagttacgctgggaaccaaggagaatgaagttgggctggatcaactgctatggggaagatgataggtcatcaagacagagataattaggtgcatctagtaacattaagatcccagctgatgttacagcatgaataagaaatggaattaagtggtaaggttacatgacttgatactttagaaatcccagaagcaactaaagaaagaaattaatttttcctagctatggagaattgacaaaaatatgtttagaaaatgtgaagggtttcagccaagtcaaggatgttcaatggaataggtaagaatggttatccattgattccatcctgattagaaaggcaggcagggaaaaagaggataatggactaaaagcctgaactggggaggtgattatgagggaagatcatgatcagagaggaatatcaaagctataaaccttatggtactatttctaaggaatttcagagtctaaagcatgactgtgttcaggtactgaaatgggatgtaaatgaaggtaactaggaaggagctggctagcatttcaactgaatatcaacctggatagtgacatcatcactgaagactgtaattggtgggggtaaccatatgacccagtttgcctggatccttcagtttatgactgtggtcccagtgttctagctgatatagacaataaactctatgggggccctagtagcagattacaccagaaattaaaagaaaaaaaaacaagcatcctgtagtttgccgattataaacttacaactcctattgaatgtgctgtttggaaatctgtagctctagggaacatctaagagaatactgaaggaataagataagtgatacaatcatcacccttcgggggatgagacagcataaaatcaatgcctgaaccagatggcatttccaacccaaagattctcattttataattttatgatttgaatatagatgtttgccttcagttaagaatgagaatcaggtaagaagtaacgggactaagctccctaagaaaaagaggcgaaaataggtttctttacaatcaacaaatcaaaggtagttaaaaaaaattaacaagcatttattaatgcctttgacttccactatgaaggaaaagaaatgataaaaggccaaaaaaaaacccttacacatccacacagagaacgcccaaaatctcaaaccaaacctttaacgaaaattcaccttaaactaatgactgacaatcccagagagcatttaaaaatatttttaaattaatgaccaaaacagaacgccattattatttcaactccctgttagaactaccagtaacctatgatagttatcagtgggattttgatcccaagtttaatattaaatagttaaaattaactctgtgatgggtgactgatattattaattcaacaggatgccataaaaattcatagttcagatttttgcataacagcagactctgatgggagtgggcagagaccttttcagtgataaacagaaagattaatttacaggatacaaatactccatacaagatgtttcagcatctctgaggctgaacacaaaggccaccttacctcccatctgcatagtctgtgtctgctccgccccaccagacatccgagtcatcctcctccgcatcagcagaatccacattgtcactttcttcagccagtgggcaacacacaaactctacccctcggaacttgtcaattccgcagggcagcaacatgccgtagtcatgcaagttggtactcttctcactgcatgtctacaaagtgtaaggagaaaacagtgagtggtagagtagatgtgtttcattgtaagaaaactccacataaaataatcaacatgcagacccaatatattaggaaccaatttcacaaaggaaaagattatttgctttttgagtgaatttacaacaggattttttttagcatgggttacactttggtactctttttattcttgtttattatttatttaataagaccacgatgttatataatagaggtttatacgaacaactggaatggaaactaattgggaaataagatgtagcagtctccactggtgaacagataccagagaattaatgccttctggcttaattcgtgtatccagaaattgtgcgcattccaggtagatccccagctcactcctacctcccttacagatggaagtttatctcacatggacctgccttatcctagaaattctgactctcttggttcactttcagagtaacaatcctgggaagagaagaaattatcccctgcagccactaagaatcagaacttacagtcattagagatttctccttgaatgtctttttgcttttctgggatttgctaaatttgcacaaatctagattagcataaagttctgagagcatccactagtgataaatgaaggatgaataattcaagacataaaggtagacaatgaaaatattacagactgtattttgaccttatgggagtcatttccgtttcttagagacaaaggatttttcttttgaaaacacagaaggaataaaaaatgaggttatcaaataggtagctggacttcaaattatttggtttgttttcttaaactcagcaagctcttaaacctccaaaacacatttttacataaaaaacattttattctacagtggatccaaatatactattttataagaggcataaaataatactaaatcttcagtggtattttctgtctaacagctataaagctatgatacaatggttaagctaagctagatcagatttctcaaccccagcactattgatgttttggactgcctaattcttgggggtggcgggtggttatcctgttgactgtaggatgtttagcagaatctctggcctctgggcactatcagatgccagtaacaccactccctcaagctgtaataacaaaaaatgtctccagacatgttccggtgagggacaggggatcaaaattgactcaagtgaagcactatgagctagataaaggagcctaattctagttagcctaagactgatcttgccacaaataaacctatataaatttattaggaaacctatcaaggggacacagcagctgtgaaggtggtcttaccacacagtgaccttttcatgctaagtatcttacatcttttattggcttagccaaaagcagaggttaaccaagtgctcggtcagactcaccctgtggaaaaatcaagatggtaggcatggcctgctgaatataaaactggatggtataactgagaaactgaattctaactggagctttcaggctggtataaaaaagctacttcactgttctaccactgtattcactaatagataacaggggaaaaggctaaattattaaaaaattgtatatgacaaaagaaaacaacaggtgcataaaaataatctgaagggtaaactttaaagttataactattagagattatatttttaagttataaggcatggcacagacaacttatatttttaagttgcgaaacacggcacaggcacataatgaatctagttcaactggccctatttttgactttttaaaaatattcatggatggggaggctgcgcatgtgtggggacagggggtacacgggaactctattttctgttcgattttgctgtgaacctaaaatcactctaaaaactaaaatctgggttacggatagtagcactgggtttttttcttaaataacttatcaacatagctgttgcctcaaaatacccctaaaatgccattaagcacgtccccaggaaatcttcactttgcaataagaaagaatttatgggctggtacctctttggcgacggtgtgccagtgaagatgagtttcgcaaacatccatcctctcctggtgtaagaatttgcacttgtcaggaacgagaagggcatcacttacaaactcaccaactgaaagaaaggaaaaccacttcccgtcattccatctgtatcacagtgttcttaccgcagaagacatcaaggaaagatagacttcaagacaagttaaacagccttttaatgcctaagcaacccaatcaagaccctactacctttagaatgttacgtctggcctccttaagcaactccgtttcttgccacttcaagtttgatggttaaaataatgcctaaatgctgcaagtgaaattgtcccttaattaatctgaatttcttgcttcaaaattaatcctaaaaaagctgcttaactagagaaccaattaccattctactacaacaggggagtaaaatataaatattgacattgtctaggtaagcatttgagcagaatcaatataaatccctacttttctttcttggacattttaatctgcttgtaagtaacagaaattttagcatttttctacttcctaagcaaaaaacccaaaagtgtattttatatatatgtttacataacacacataagagagagagagtttaattcagtttattctgaaaactgtccctcagacttttgttaaatctttaaagaaaatgtatattatgcaaattatttctaggcatttctggtattgaagatataaagatattacataaagtcctacatgaactcagtctaatgaaggtaaaagatggataattaccacattatatgtaagctgtaaacttaatttttgtttactgcaatattcccagcttttagcacagattcttgcacatagtaggcaataaatatctgttaatgaatgaacaagttaaattctgtaatagagataaggaaagtgtcaggccagtatcttgggtgcagtgggaaaaacctcaaagaagaaacaatattcgagatgaatctgaatggtgagaagtagtatgccacatgggaaatgaattgaacttccataacgtaaggatagactctgtcttgcttgccattatacccccacaattcctggcctagttctgtcaaacatcaagaactctattatagaatccaaatggatggatggatgggtagcaaaagacccttcaaaatgagggagcctcctgtgcaaagacagagtaaagaaccagcaaggcatatttgcagcccatctggatatgggtggaagcagaaagcaagtggcaaagggagtccagaaggaagtagcactggggaagcatgctggactccaattttaaagaggcttaggttttggatgccattttggaagaagcaacataggccaaaagtttttttttttttttttttttttttaagatagactctataattaagtgaaggatagatcagcatagtgaaaccatgaaagcagggagaccaccaagtaggtcactgtggtccttcaggcaaaacatgcaagaatagacataaacccacaactcccacggagcaaggaatacagatcgtccacacagcagcaaagacaggaatgaatgtctttctttcatagtacgctatagggcattttctgaaatgcaacataaagagggattaaaagccctaagaaggggaaggaagtaacttttcattctcataaaagggtttaaactttagtctgtttctagctcaaacatgtaagatgtagcatgatactgaagtacttatttcaataagtactatttagataaaaatctaagcaaatcataggggagaataagcactgtatcttgtcattccttaaatctttaaaatgatcaatgatgcccatagcagtatagtgtgtgttgcagggaatgcaaaaattatgagacatggtaccccaaaggctgcaggtgtcactttgcagggaagaaaccagtgagtactgagcacacaccccatgcagctccacagggccacatcacgggttcttttataaacctcacttcccaggggaggaatctccgccaagaaacctaaggctacctaactcaggagattataacctagccccagagataagcattaagatataaattataaggaaagaaataacatgataatgcaaatgataccacatttctcttttacatagaatgatataaaacaaaacaaaacaaaacaaaaacaaaaaacacaagaagacctggagaatggaaagtaaaggtaatctcatccaaaacaaatacaccattcccaggtggatttctcagggtttctgagggctctcagggtttctgaggtcagggactaaccctagctgcttggaagaatacctgatatctgaggcatcccaattttctaggttacaggaggccagaagtaccctatggcctgaagatgcccacctcatctgtcagctctgctcagtcatatttgcaaatgtccaaactaagaagtgatgcttttctatttgacaagtaactactggaaagattaaatgcctgtcatgtacaaataggtcaaagagtttaaaaaatctaatgctggcccaaagctactaaatcagttcgtgagaagagccagagcaggtatcagatacactcgaccttggcctgcaagagttcttgggggcataaatcagacagtaagtgccaaaccacaaaaccaaatcatcttgttttatctgcccttagtcaatctgctgacgactagattataatgcaaagctaaagttaccaaaacatatttacttattcaccaaaaggacatgtactgcattaatctttttgtttgtttgttttcagacaaggtctcactctgtcaccctggctggaatgtagtggttggatcaatggctcactgcagcttcgacctccgggggtcatgcaatcctcccacctcagcctcctgagtagctgggactacagctgtgcaccatcatgcccagctaattatttcactttttgcagagacagggtctagatatgttgcccaggctggtctcgaactcctaggctcaagcaatctgcctgcctcagcctcccaaagtgccgggattacagacatgagccaccacgaccagccagtctgaacatttttaatgaggagttggtaaacaagcttttcttaaaagcctgaattaattaaaagttgccttggatattaggagttcattagctaaggatgttactcttactttcatctggcagaaaatctatccaagagaaccatattcttgaacttgtgtttaggacagaggttggcaaactactacttgtggaccaagtctgcccacccaccacccccctgcccccaacacctgtatttctgcattagactgactataacaattgttcattatgtttataagtggttactgaactttctaacttgcaaaacatttcatttgatactgccaagatggtcttagcttcttatattgcacaaagctaagaaatatgtgtccctcaaaatgagaatggttttttaaaggattaaaactggttacttaataagctctcaggactaatggcaaaatagaaacctcattgtattctaacattaaaataaaatttagcagtggacagcactgcttacattacttttaaaatttgatgaaacatgttagaaggttacacatcagaaattgtaagcgattcaaccacaaaaatctgtttttaaaaacttttaataagcgttaagagtgctaaaagtataatgaagcctttttcaccaactggcttagcacggtttatattttctctttttaattaaaaaatattgtacttaaaaatctttgctaggacagcagttacatggaaactgtactttctactcaaacttgctgtgaacttccactgctttgtttttaaaaacaaagtttattaattttaaaaagcctatgatcgtatatacctggagtttctctccacagccacgtataccttatttttataaatgcttctgcttatttgctttgatctttcaggtaaaaagagttcttaacagaattctgatgtaagagatcaaagactaaaacaaattaaacatcataatgagaaatcatgttcctgtttacagcaaactttaggcaatttggcaccatttatttcaagtggataaattcatcaatatacagtatgcatgtttattgagaaacatacaacctggtttcttgctaaaacaattcacaatttatattcaaaacgcatgtcacacaccacacacacacacacacacacacacacccaactgaaagggtgttttcaaagctaatgaacaaaatctgggtctggcttcttggctatgaagtcttggcaaggtgaacaaggatggcaaattcaataggagtctgcaggcctcaatctgctagctctttggtggtctttgggaggactgtctagctcaaattacctcattttgcagatgggaggaaaagagctcaggtcaagtgacttgcccacagagccaactggcagaagaactagactgaaaatccaggtctccagttctccatccaagagtggtaactcaactcactcatttaaactctgttcaaaatggttcatttggcccatttcctttggcttttacaaaagtagttcacttttagactgtgaagtactttaatattataatctacaatgtggtcaatttgacaataaaactagacttaaattagctagcaagccatatagaacagctgggaatgcagtcagcggcagagaatagaccacatgtcaaaccgtggcttaaacacacggtaggattatgtatctcacctaagaagtgacactgaagctagggccactgcagatattccatgatgccatcagggaccagcgtattcctatctttctgtactgccatcctgagcacgttggttttatcctcgtgttttatggtcacagaaattcaagactctgtgtccaagttccagacagaaggcaggagaaacaagacaaaggtgaaaggttttctgttgttgttttttcctctaataaagctttgctgttacttgggagggacatactcctcagcaaattccactgaggccatatgtgccattactgtgatctggtcacatgcacctgcaagggaatctgtgaaagtattttcagcagagcacattgtcaccctgaacaaaaaaaatctggaattcttttagaaaggaaaaaatgggaatgaatatcaaacaggcgagtagcagaggctcccacactatggaatttaaagtatatttttcgatttctttatgttgtcttttcaaaagacagacagaattccaggaagcaaacagaattcagagtaaaaagtactgcaactaaaaccacagtaacttcccaatccatgacattgggaagaatgagaagggaaagatgtatcaaaactgactctgctgccaggatggcggcacctgggggtgtcatcccagctacttgggaggctgtggtgggaggatcacttgagcccaggaatttgaggccagcctgcataacttagagagaccctacctctaaaaataaatgtttaaaataaagacattaggccgggcgcggtggctcacgcctgtaatcccagcactttgggaggccgaggcgggcggatcacaaggtcaggagatcgagaccatcctggctaacacggtgaaaccccgtctctactaaaaatacaaaaaattagccgggcgtggtagcgggcgcctgtagtcccagctactcgggaggctgaggcaggagaatggcgtgaacccgggaggcggagcttgcagtgagccgagatcgcgccactgcactccagcctgggcgacagagcgagactccgtctcaaaaaaaaaaataataataaagacattaaaataaaaaaaaaacagactgctgaagttttgagcatcagagtggggttgagtagattaatgtaaaagattctagagccatacacaggttcttcaaggcacagattatttgaatatcagattaaaagacaatatttctatgaactgctggggactaaaatgatgttggccagaatcatgggaatgaaaggccaaaaatgcctgaggtctttggacttctgcccgaggtgtgccctctcttcctcatctctcaagaggtaaagatgattcaagaaagtgggggaaatgttctggcaatgtaattactgtaaaatgccaaagcctcggtttccttgtgctatgggcccagatctgccttgtgaagataaaacaccagtattgttagtaactctgaactgtgtgcctgccaccaccctcaatacttcacgtgcgtcttctctcaccgtcctcagaaccacaccaaagcagctacaatgatttcactttataagagaaggcaagggccgggcacagtggctcaagtctgtaatcccagcactttgggaggccgagacgggtggatcacaaggtcaggagttcgagaccagtctggctaatatggtgaaaccccgtctctactaaaaatacaaaaaaattagccaggcgtggtggtgcatgcctgtaatcccagctactcagtaggctgaggcaggagaatcgcttgaacctgggaggtggaggttgcagtgagccaagatagcaccactgcagtccagactgagcgaaagagcgagactccgtctcaaaaaaaaaaaaaaaaaaaaaaaaaaaaaaaaagagagggtgagactgagagactatgtaacagtccaggtcacatagagagtaaatggcagaactgggagaattaaatgaattaatatccctaaagtactcaactagtgcccagaacaaagttgctcaataaattatattaatagtatccttctccccagtatctatctcatcaaccacagtagtttctcataataataatcatagtaatcaaaacagcaacagctactcttcatcattcactaatcacctatttcgcacctactgaagacactggggttttatatgttcattgcaccatcaccacctacttgtagccccacagagatgacatggtactgttttacatgtgagtactgcttatgatggggtgaatacatgacagcaatcaacacagcggggtggagtccctacgactggagaagcagagaatctgagtgatcaactctttcaactcttgcaccgagtgctggtcctggctgggagggggtgtttcctaaatcccctcttgcagccactgtcctttatccactaactcttcactgcatacttacaattatgtctcagtgctaagaatacagcagtgaacaaaacagataaaacgatatatgatcctagcggggaagcgataaaaaatacagataaaaatacagtgtctgttggatggtaataaatgttacatagataaagcagagaaaggggtggtttgtttgttttttctgaggggtgaaattttaaatagggtggtcagggaatgcctacttgaaaatatgacatttcagtgaagacttgaggaagtgagggaacaaagtattcagaatcaaagggaagaatattctagccagaggaagcaacaagtattacacaaagtcttgaggcagatgcatgcctggtgaactcacagaagaacaaggagatcagtgctgtcgtggaggaatgatgtggaagagatcagtgggcaagcgagtgagtgacagccaggacaggacagggacagctgactgcacggggccttaaacattgtccaactctggccagtactcagagtaatgctggaaggctctggggtggttttctaagctaattattcttgccctagggggtcaagactagaagtgagaagaccaggaagggggctctggcattaatccaggtgggagatgacaatgacttggaccaggatgagagcagtagaggtggtgcgtgttctcagattctggatgtcgtctgaaggtcagatctaaataatcaaatagaaaggagtcaagaatctagcttgtttctattccaacagctagaagatgctttatactgaagatgatggaaaagtctggacaagactttcctaatttttctgtgtagatgtgtagacaggtagaacttttgagaattatgtacttactaacttgtatacactagatatgtgtatatgaaaatgacagctacagataaatgttttcttaagtgattttttattttaccatttcagactcttactccacaaatttttttgtcttgaatgtgctcattatatgctatcttttgtaactttcacattaacaaataggctgggaaaattttcctgggaggcatctgtactcaagagacgggacgattacttcacagaaacagccaaacatttctcaacaaactttccatgtgataaaactgttatggttttagcttcagagtgtgggcagttactgggttctcaaagaggacatgagggtgaattacacatccttttaaaaagtggctgttgccgtcaccagcatttcactgtaactattaccggataatagtgagaactgacagatgggattcttcagatgagaactatttgccagatggtaggaactaaatggatcaagataagcaaaaaggcaaaagaagtgaaaactaaaagttttacctaaatcatctctccaacttttccaagtgcacagatccagcctcacatacgtaccatatacacacacagatggcagagtgagtataagacagaatagtgctggccgggagtggtggctcatgcctgtaatcccagcactttgggaggccgaggtggatcacaaggtcaggagtttgaaaccagcctggccaatatggtgacactccgtctctactaaaaatacaaaaattagctgagcatgttggcgcgcacctatagtcccagctactcgggaggctgaggccgaagaatctcccgaaccagggaggcggaggttgcagtgagccaagatcacaccactgcactccagcatgggtgacagagcgagactctgtctcaaaaaacaaacaaacaaacaaacacacacacacacacacacacacacacagaatagtgtttaacccaggctctgaataacactggtcttaaaataataaaaatagtgcaaaggatttactttaaaaaagagaaaagaaaaaaaaaaccacgggaacaaaataagtatttatggccaggcatggtggctcacacctataatcccagcaatttgggaggccgaggcaagtggatcacctgaggtcaggagttcgagaccagcctggctaacatggtgaaaccccgtctctactaaaaatacaaaattagctgggcatggtggcgggtgcctgtaatcttagctactcgggaggctggggcaggagaatcgcctgagccggggaagcagaggttgcagtgggctgagattgtgtcattgcactccagcctgggtgacagagggagactctgtctcaaataaataaataaataaataaataaataaatatttgttagcagtcttgcagcttttaaaaagatccatataggtgtgggttaacaaatttttttatattttttattttttatttttttaagaaagagtcttactctgtctcccaggctggagtgcaatggcacgatcacagctcactgcagccttgacttcctgggctcaggtgatcctcccacctcagcttctcgggtagctgggactacaggcacatgctaccatgaccagcaatttttttgtatttttagtagacatggggttatgccatgttgcccaggctggtctcaaattcctgggctcaagcaatccacctgcctcagcctcccaaagtattgggattacaggcatgagccactgtacccagcctgggttaacaattctgatacggctacgcacatatactgaaactgaacaattaagtacatagatggtggatggagtgagaatttatacataaccaaggaggagagatatagtgtccatgtggtaatacgttagagtaggaaacatccggatgaacttgtatttagcttaatatagactagatattatagcttaatataaatacaactagttagctatagaaatatttatagatctgcataacataagggtgaacatggacaaatacattgccttgctctatcaactgagaagtcttaaaagcaaagaaactccagtggcaacgagcatccttaacatccagattttaatactattctccaataacattactctccaataaaaggaacaagggctccttggaggaacagctgattctaggattagggctgaaaatatgcaagatgagactgcagcatcttgtaagaaaaaaaaaaaagaggctatgtcaaatgagcataggaaccaagtgaaagggcttctaatagctaaagccggaataatttgagcaataaaaattatgaagtagtgctggattagaaatcaaagtacaatgtaaatatccatgagtctaaatgactgaatgaatgaatacataaataggaaaaaagagacaaatctcctgcgcagaagaattccaaataatttatgtagatactctgccctcaagaaaatgaagcataattctctgctccttaattgtgggctgtgcaaactgacttccttccaaagagtagagcacataaagtgggaagacgagtaattttcaagtggagaaactcaacaaccaccacctgagccaggtgatcaaggtcaatgccaacagggctgtatcatgttgataaacacgtacccttgatatgatgtgatgaaatgggcattttacctctgtggtcttccttcttaaaaccaataaccccaggcaaagcatgagaaaattcccacagaggggaatcctacaaattatctgaccaatacaaaacctttaaggttattaaaaaactagagaagtataaagaaactgtcatagccaagaggaaaggaggctatggagacctgacaattaaatataatgcgccttcctggatggcatcctggaacacagaaaggacattagacaaaaactaaggacatctgaataaagtatagactttagttaataaccatgtatcaaaattggtttactgactgcaacaaatgtaccatattaatataagatgttaacaatagggaaaactggatgcaaagcctatgggaactctctggactatcctctcaattttcctgtaaatttaaaactgttgtaaaatataaagtctattttaaaaaaatttaatggcttgatataaaagttcacataataaggtgtcatgccaaactcctactgactgcaatgtggatggcaccaggttcaagagccagaagaggcccagagctagtgaaccgtatgtctcatagggttttactgggggcttgcatacagggtagagagtccagtggtggtgggttggacagaggaaccgcagccgcttgcaaaaggcatgtggtctctacagcattctcatttaacaccctccccctaacaatctccacctggcaacttccacttaactcataacaaagggtctcaatccccggcgaggcccatgttccacagaaggagatgagggctcagatgttccttacagataaggaatggctctctgggttagccactcctggatttctttgttgttgtttttttgttttgggttttgttgttgctgttgtttgaaacagagtctcattctgtcgcccaggctggagtgcactggcgtgatcttggctcactgcaacctccacctcccgggttcaagcaattctcctgcctcagcctccaaagtagctgggactacaggcctgcgccaccacgcccagctggtttttgtatttttagtagagacggggttttgccacattggccaggctggtcttggacttccgacctcaaatgatccacctgcctcggcctcccaaagtgctgggattacaggcaccggccaccccgcccggcccactcccggatttcttaactcagaactcagaatcaggtgcacctgccacacaggatcattgtcagggcatgttcaagtcaagtgatccctgtcaggtgcatctaccatacatagaggcatacctatttgattccacatcaacattctagccttcaaaaaaaagtctataaaattattgtagttgaaaagaactagaattaaaaagagcttaccaactcaggcatctcatctgtggtatctattaataactagacagcgcttggtttgacttttttttagaaaaaaatataagtaatgtggcatttaaattttttaaaaattcaagaatttcaaaattatcacatatataccgaaaattctttgctttccaaatttaaccttgtcttaggaatgtaaactaactggtcagagaattcattcccctttacaaatgaggaatcttgagcctgatgaggtttgcacaaagctaatgacagaggtgggctcaactctgaaaaccgactctcattccaatgttcaggaccccaagaaatgttacagtagtcttactaattttgaatgacagcttcctcattaaccaacccaagataagttataggtgcttttttgttgcctctttttgactgcactattagtcatatcttgattttatcaataacaggacttcttgttacaagtatttaataattccaacattcgttaaaagatggaattgtaagagtaatagttgttaaagctttccagattaggggttttcaaactcaaaccatgcttcaaaatcacctgggatcctgatcagtctgcagattcatcttctccctagctccacagcctagatctgatttacgtgttctgggacgcgcctgaaaacagaccttcccagggtggctctgcttcaggtggctcatggatcacactttgagaaatgatatttggagcagggcttctcaagctttacagtgcctatgaatcacctgggggccttgttaaaatgcaggttttgattggacaagtctagggtgggactgagtctgcttttctaacaagctcccaagtgatgtgattcagctgttccttccggcagtaagggtctacttaagataacccattacaactaatctcattaaggtttttaaaaattttaagttacaagttattgctttgtaagacactctttgcttacccacttttaattatacagtttagtgttaagtagattcatatcgttgtacaaccatcactaccttccatctccagaactgttttcatcttgctaaactaaaaccctgcacaccattaaacaactccccattcccccacctccactccccattcccccacctccactccccattcccccacctccagaacctggaaaccaccattctgttttccatctttttgaatttgactcttcaaattcaaaaaggtaccgcatataagtagaatcaagtatctgtcttttggtgactagcttgctgtgtccttttaaaaaataaaaattttcatgcttctcttccataaacctgcatctcatcctatagatttgtcacttttggcaccaacttaaggactgagcgccttttcacacatccctaagagccaagctgctcctggttcgccttttgtttaattatagaagttacaaaataaggtagaaagagttctagatttgaaaacaacacaatgactcaagcagatcaagtgatttccaaatattaaaaggtgatatgataaatgcctcctggccagagaggtgcacatagggtgagagacaagaataaaaattaaaacttaacataatttgataagagatcatctctgctactgctgagtattactaaataccattctatgcaggtccatgtaggatacaaaagaaccgagatatagttctggaccaaaacagcttggagcagctttgtctcacagaaatataatagaggccacatatctaatttaaaatttcctgtagccacattaacataaaaaggtaaaaagaaacaggtaaaattaattttattaatatattttaacccagtacatcctaaatttcatcatttcaacatgcaatcaatgtaaataattatcattaagacattctacatttgtttttttctcccagactaactttttaatatctggtgggttttttatactcacagcatagtttggactagccaggtttcaaatattcaatggccatgggtggctagtggccaccgttgggcaagacagacttagcatcagattttagagatcaataatatatttcaaggagtagtgacttgaatgtggacaggttggggttatgggagaaaatctaaagccaaagacacaaacctaggcagagaaaccataataagcttgaatacactgagactgcagtacaccattttatgcgctatgctatcttaacgcatacattttagtcaatgggaggcatatcactaggattctatgttaccatcattaaccctattgatcagcaaactgctcatctccccccatttctcttgttgcagttctcatatcataaattgtatttataggtgtgtgattaattctaatacagaaattaatttaaggtttcctttagacttgaacctactttagcttagttcagtcctctgtatcccgagagatgagctgaaaaagcagatatagtagagataattctaaattccctactttgtttcttcaaaatataggtattctcactggttgctttctcctaacactttcctttctttctgccttatttaaaaaaaaaaaacaaaaaactcaaagcctgatagattttagagacgcaattaattaaggttatatacggggctttttaaaaaccacataattgccgacaaaataccaaccaggttggtgttccgtgaggcaaaagaaccacaagtcattaccaaaaccttaactcatatgggaaggtaaaaatatacagcatgctgttttcacataccatactcagaaagccatgtgcgagggaggctataatcaagacaggaagaggcattttcacagataacttcttaacggggttgtagactgtcactctcacgcccctcacttgttctttccaacctattaccatctggccttgctccaacaatctgcaactcttctttcaaggtcaagaacaacaaatgccatcagtctcttctcagccctccagttctctgactactctgccacattctctttttttttttttttttaaagagacggggataccctctgtcaaccaggctggagtgcagtgctgtgatcatagctcactgcagcctcctgggctcagacaaccttcctgtctcagccttccaagtagccgggactaccggcacatgccaacatgcctggctaattttttttttaattattttttgtagagacaggggtctcgccacgttgcccaagctgatctcaaactcctggcctcaagcaactctcctagcttcagcctcccaatttgctgggattctaggcatgggccactgaacttggcccacttttcttctttaaattcaatcttctccagtttccaccaatctatctcaagccaatcattctttccctctcattggctcctcttttcataattctgattataaagtaaggctctgtcttctactcttcttgctttctcactcagacatatcatccatgcctaagggtcaacagcctcctccactctttcaattctgacctttcacttagcattcccagtcgcttgctgcatgcttccaattgcagggtattaattacttttagcaaatgtactagaatcaagtgcccaactgattatcaaattccggaagtgtacccaaaggacaatgactaattcctcattgggtcaaagtctttcctatgtggaagcaagagaaaggaacagaactaacactgaacattgtgaggagcccaaaacatgactcctgctgaacacattctatttggttgtagaacccaaccaatataggccccgttgatcgatttccccacaacaagaggaggtcataaaaatcatgcttccactttctcaatagatacttatcgctcatgaatgtctgtgaatcagaagaccatgggactataactctactccactcaaactctccatactcccaaagctggacctcatggtcctcagatcatgtaatactcagacacagcactccagtaaaccactttctggccagaaactcatccttcccatagttcctctcccttccatccactacagcttgttcatcatgatcctgaggtcctggatgctgcagcactctctgcagttatcaggggaggcttcactgccttcagttcatttccctgccagcctggtctaggaccctcagcacacacactcatcactgcacatatcaccaacgaccacccacatgcttttgatgcccaggctcatttggtccagcctatttctctcctaagtgtgagactcaataaatacacaaccaccccactgtgctcttcaagagcttattaactgcctcttttagattctcctgggtatagtccagacttaaaatgcctcactttgggagacaatgtaatttaaccattggaggaacaaatgttggtctatatatttcaggcattttccaaataaaaacctccaagaaaaagcaaacttgtatcttaaaagatgcagaactatttagggcaaaaagtacacagagaatgagaaagaaaaaagatgtcactgcatttaacaaaagagttaacaatattgttaacaataacaagagttagccatgaagtaattaggatatagtacttgaaactggcaccaccttttaccaggcattacaatattgctatgagttcacaaagctctgttagagcagaggaaaaagaaggatttgaattctgtcactgtactagcaacaccacctagggatgaggaagacaatatctaatagaataacaaataaagtaagtatacatgattcatcaagctcttcaataaaaatgtattttagaatttatcaacatcccttttgaatcatgtttcaaaaatcacacaatctgttcaaacacggatagacccccagataaatcagaatctctctctctgttaccacgcctctgtggacttagaaatcaccacttagatttgtaaacaaggcttagtttcattattgtaaatcaatttggcaggacttatcactccacagagagctgaaataattgaatttctggacttctaaggaagaaggtttaagtacattaaggcttccaaaaggaagatcaccaactcttctttagcagaaaatgcccctggagaattttgaaccatttcttgatctagtggcaactggatgttatcagtggcaactaaggtatctgtctacacctgctgaggctcacaagtaaaaactaaaaagtactgtgaatctctgtgataatggagcgtaaagctaccacttaagtctttattactagtaagtaacggattttaagaaaaaaagagatactcaaatctatctatagataaccaaaaaaccaaacaaaacacccagaaaaatctaaggttgaagaacatatataatttgagacttttgaaacaaaacacccagaaaaatctaaggttgaagaacatgtataatttgagacttctgatcagagccttcctcaataatgtaagtttaaaaactattaccaaagtgacaagatcccatgtcagatagcagaatgagaacaaggctactcttcaacttagtcatcctcttttatcactacaacttcaatcatagatgtaaatggaaatttctgcttcctttgctacttttctgcttgactgaattttataatgaaaaacgtctgttccttccaggcagagcacgagtgtcattcaaattgtacacaccaggcaaagagtgaatgcatttgtttagatgcaaaaatcatttaaatatgtgtcattataggctgcagcacatttgcggattcggcagtttaaaattctcttaagcaataaagcaaggcatcaaatgaaagtgcactcaggcttcaaacatcttcagactatgttttcctgtttgcacacagcgagccccgccttcctttcctgaccccactcaaacagaaagcagtggaaccatgccctagcccatcctattaccccaaacgtcttccaggtcagcaatccaaagtcacgtgaaagctccatcttcagtttccctctccagggagcaaatattttgaagagcaagcattccaagcaagcagaaactcagcctttaaatcaaactaagcttaaaagtaaggtcctgccgcacacagaaggcaacagaaaagtgtctgaagagatagctcccattttatatttaacatttagaaatgagaaaactgtgtgtgattaatgcttataattagagggggttaacccttatttcaaataatgtagttcctgtctttcatttaaaattataaagatgactaaaatgtacatgaaaggaaaattacagttaggatctgctgtgttttaacccagaactgtggttttttgaagaaaatgctggaaaagattctgatttggtaagaatatctggatatgagaatcttctaagaaaggtgatttaccattttcaggccaaaggcagagagtttctaacaatgataaaattaacaggctgtaggatcttcattctctaagcttcaggtgacccttttaatgactaaataaagtgtgtactcaaggtcacccacgaggaagaaaaaggtcagttccctctcttgagggaccccctccccactcacgctattacacagcaattctagagattcacttcatttttggtttatgttcaaactgtctggatatttcagggccttcgcttttaagtttccataatagggcagttgactatttatataagtccctggaaaatgtgtatttttaacgtcatctagagtaggccacctttgggggaaaacagctaatgggttaaaaagccaactggtgtaccaagtatgtacaaaagacatcttttataacagttctcacgtgcaaaagaacattcattaagtataacaataaataacaggcaatatgtgcatttttccagaccctaagcacttgataaagccatattgtcattttacactcatttttagtagctgtttaattggtattcctgtataggacagttttgtaggtttccggattatttcacattctcttcttcctagttataaattttggtacaactgtaagctctcctcacactgtaataattacattgctgagaccacatctgtttttttaaaaaagatattttgcaaaaaatatatttaagttgaagtatctgaaatacttttcaacgtcaaactttgagaggattatgcttaattatatatcttcacatctttaaattgttaaaaatgaatgcataaatatttcctagggatttatgcttgattcatttgattcttacatactagttgttatttaccggcagagaaagcaaaagcaaaaaaaaagaaagcaaaaacaacaaaaatagttgattctggtgctagtccagaatcaggttgatttctgcatcaatagcagggtttctacattaaattcattcaaatttaattagttctctgcataaaatcaagggtctaggagaatttaataaaagctgaaaacaatcctatcctttgcctgaaacagatttttatcccaaatggtactcagcaataagccaacagagaaaaatggaataacagacatatgccatgttcacgagttctctgtttaacctaagaagtctgaatttgccattttttgataaggaactggtgtacatcttagaagaaatattccattgagtctgaattcttggtggagcacccgcagaaagagaaccagtaaatagtatgtatgaggcctggcctggacataatgactcaggaatcatcaatgcaggcctctgaaaaaccactgcacttatgagatctcctagcaagtatgtgttgtgtgagaaaatggacaaccccagggtactcctattaaacactgatatttagaatttctgaattctgattctaaatattttgcaatatttggaatttctgaatcctaaatattgcaaaaggtggcgcggggaggacggggaagggagcctgaaaggaaaatggaggacagcagaaagaaaatcagaagcagcagaatgacatcagtgtggggagaatgcacccatcaaccgatgccactgagagactgtggaggacacaacagtgcccagtgagtccgacaaccagaatgatagcaaagagctcattccctggagctcaaggaacagatgcctgataacaggtgactgtggagggaactggaggttacgaagatcacacaggaacttctgactaccatataaagaagcatatctgtgaagagacagagcgagggtggaagttaaaggaatacacagagttgaatgactggagtgagggatcagggagctctaaagaagaggaaaaatatgagaaggctaaatactattgagatgtgaaattaaatacagggtcagtaggccaagggtctttatgaagtcaaagatcagatacaatgagagtaaaggacctactgaagaagctgtgtgcacagatgcccaggaattcagactcacctaagaatttagaacaaaggtggaaaaagaaaactaagctcaaattatttaaatagtacaacagggtaacttcttgacatactgaacatgagcctattcatgttaaatatgcttggagaatatcattagtccatggcttacaatcaattctaagctttcaagaaagcaagagctacaggacctattcataaaaatatagcaacattgggaaactaattatcttcccagctgataaagataccatccaataaatagggggatcttcagtgacatccaaaccttcaaaaaatatattttaaaatgttataccacgttctcggaaggtagttaacactaaaaaagatttgggggaactgaagctgagtaatattcttgaaaatacaggtacctaatcaataaataaagagaatgccccccaaatttttcatggcatgaaaatacttaaaggtttaagaggggagtacctacatctattaatacaccaaacacctactgaaacgccacattcatgtaatcacttaataaagacattaaaataggatgacaggagttcatgtttagcatttataaatagtatcctaacctttaaggtacaacataagaatctgaaatttctaaaatctattatcactgaataatatttagaagcagatttctgtgaaaattaattcttaaggccaggcgtggtggctcacgcctgtaattccagcactaggccgaggcgggcagatctgttgaggtcaggagatcgagaccatcgtgggcaacatggtgaaaccccctctctactaaaaatacaaaaattagccaggcatgatggcgtgtgcctgtagtcctagctacttgggtggctgaggcaagagaatcgcttgaacccgggaggcggaggttgcagtgagcagagattgcgtcactgcactccagcctgggtgacagagagactgtgtctcacaaaaaaaaaaaaatctttatcattagccttaaaaactaaggacaatgaaactattataaatgaatctaatggtatgttttatctctaaacacagatgcctctgatacactgactttttactagacatgtgtaggataggtttaaccctatttctggagttgaatgttctttttattaagatccaaagacacttggtttcttctcttctgagatccctatgttacttcttggttgttacataaaacctgctcttcctttgttgatcaataaggagtaagtaaagtaaatgattttgccataatctcagaaattcttttaggcatgtgaaattgctgctccacatcttctgtctttctaatgtttgggctattctttcttttccctttccttttccaatatttggctacatcctcaattcattcattaaatctatatatttattaaatatgtactatgtaccagacatgttcaagctctgggaatatttcagtgaattgacaaaagtctcaattatcgaagagcttacattttgaacaaaaagcaattatttcccaatgtttgagcaccgcaggaaagggttaaccatcagcatcatgcactacttattcacaatatagctgcacaattattgtttcctcttatcaggccctcaaagccactgattataatactttgtcccaacctattaccctacaagtttgctagtaaaattcgaagatgaccaggagctatttgcaggatactacaggctatgaaagtattactccagagtataatcagttttttccccaatccaattgtatcatctattaaaagagctaacataataaaaagctatatcctgatgcccagaatttacagcgtaacaaggactaagaaagcaggtatcttagaggtaactttagcctattaatgacatgtgcagtacaaataaaaccacattgaatgtacagatatttttctggacatcgaataagagaaataatcaaatgaattaatgtctgtccaaatcaaaaatctctacaagtgttccaactttaatgaaccaacttagttctattctaattttctattattatttctcaaggctaccaacacaaactactttccctggaacatccccatgaatatatttatttatttattgtttaattttttttgagacggagtttcgctcttgtcatccaggctggcgtgcagtggcgcgatctcggctcactgcaatctccgcttcccggtttcaagtgattctcctgcctcagcctcctgagtagctgggattacaggcgcccatcaccatgcctggctaatttttgtacttttagtagagacggggtttcactatgttggccaggctggtctccaactcctaacctcaggtgatctgcccacctcggcctcccaaagtgctgggattacaggtgtgagctaccacgcccaggccccataaacatttttaaatctacacctcttcattttctttacgtatccctcaggatccacatcatgggtctactttctttcaaacaacttttaccatatgctccagctcacactaccatctccctacctcctatgctcacaacaacccctcatatgacttacattaaaaagtttacaattattaattaggattggaagtttccaacagatttgtagtcaggagagactattcagggaacatgagtctagttttgatcacattgagtttgaagttcctgaacaaacacgtgtcactaaaggagtgaagataaacatgcttctagagtaaaaacaatcacaagtacaaacctctacaacatcttacacagggaaattcagccctaaagtctatcaaatgggcataaaggtaattttatatttgtataatcttaggttatagccaagaaaaagcaaacatcttgtgaagttgagatatagcatacaacaaactcagctcaattaaaccacagtttagctttatctaattcaaagttaggacgcctttaacagtaacttgacttgcaacttctaagcttaaaagaaattttaggctgggcgcagtggctcacgcctgtaatcccggcactttgggaggccgaggtgggcggatcacgagatcaggagatggagaccatcctggctaacacgatgaaacccagtctccactaaaaatacaaaaaattagccgggcgtggttgtgggcgcctgtagtcccagctactcaagaggctgagacaggagaatggcgtgaacccaggaggcggaggctgcgatgagccaagactgcgccactgcgctccagcctgggcgacagagtgagactctgtctcaaaaaaaaaaaaaaaagaaagaaagaaaaaaagaaattttccagattaaaacaaatgtctggaaaccttaaactcaacttcttcctgccatcaaatataggcctccttgatcgatttctccataacaagaggaggtcataaaaatcattcacggccatctcatttagttgtctcttctgcaacttactccctaaactctgtgcttaaataactattctcctgatttttccgctgtaggtcttcccactatggaacatgagcccacccctttcccttcccaccatcctactggtatggttttaccccatatatggcatctgtattgtgagtctgccagaacgctcatacttaggcgtatttttatcttcgtatcttacaacgctgttattttgtacttttggcttttctttgtctacagttaatatttgccccatttaaaaaatttgcctcattttctatgcatccatcaatactgtatctttcccaaacgctccagtagaaccctaagaagcatgctaagtacaggaaaatctttaacgcaggtaatgcatcaatgccattttttcctggaggcctctctcctgcgaccagcctcgttcgtctcctccaatctggactagctgctctccagacggttgcacagctgttgcctgagatttcccttcactatagggtttcaaagccaaagcctaagactcactgacaggagaaggaaaaaaaaaaaaaaaaaaagacagacactcctgggatgcatcaccaacaagttgaaatttatcaggggatatggaagagggaatgtttaatgaaaccactcagtgactaatatgataaaagagaaagacgacagaatttatcctttcactgaacactgaaacaaatattgagaaccttctttgtcaagtactaaaatctgaatatttcctaacagcctttgacactgaaattaaaatacgtcttaatccagactgtagattcatctttatgtcgtttcttatatccatgatgcttatttgtgtacctgaaaaaaagcatattcttttcctcagtgctaattgagaactggctttaaaaattcattctttatttaatcacaaacatcaaataactttttaaaaatataatacgtgagaaaaaaattgtccttaatttcatttcagtattcccttcataataagtaaataaacagttctgcttttatgggtattatctggaattataaagatatgctgtacctaattcacaatagtaaactgaaaaattttaagtccacaaagaagcacttgtttagttcttttcctagggaagaaatacatcaaaagttcccataatttattatgagaagtctatgtctaatatattttacatatttatatactatttttaatgtagttcattatttaaaacataatgaaagcttgggtttcatggcaaaggctgaagttaattcagttaatgccattattttatgttgtatgtaagctactcttctaccccaagaatcgtaataatagctgtctgtaccactctaaacacttccttaaatttcatattcttcatctggctacaattatccacatggcataaaccatagagctctcaatcccaaaatcttaagttttgtcacacacaaattctgttttctactacagctgtctggaaagttatttactggcttgaatggttaaaaaaaacatcaaactcggcagggtgtggtggctcacgcctgtaatcccagcactttgggaggccgaggcgcggatcacctgaggtcgggagctcgagaccagcctgaccaacacggagaaaccccgtctctactaaaaacagaaaaatagctgggcatggtggcacatgcctgtaatcccagctacttggcaggcttaggcaggagaatcacttgaacccaggaggcggaggttggggtgagctgagattgtgccattgcactccagcctgggcaacaaagagtgaaactccatctcaaaaaaaaaaaaaaaaaatcaaactcaagacaatatctcaagatttttatttgctttggaaaatgacacgatgagaagagggttctgaagacaaaggggaaaactgtttcctttctctgcttggggtagggactgatggaaacacagtgcttgagaaagatgctcagaagcggctagagtagaaaaagaactttgaagaaagtccactttcttctttgattcctcatcataaccatttgtaatcatttacctcagaataaaagagaaaattccacgacaataaacacagcttgaggttagctagaaatactgttcacattaaatttatggtaaaacagcaagctgaaatggtgtgggaattatctaataatttccaagactgaattacgcagctataaagcaacagcagctgtttactggttggcccagaaaagttcacatttcagaccaccagatcagacataacagtattaattcctcatacagggagaaatttttgaagactcaacataacagaaatccagtgttcagctgatacgttattaaatctgacggcatttttatggcatttttaaactatgacacagcttcaggaagtcctgaaaacttgagcctctaaaggcatttttgtcttttttatacaacataggtgcaaaaagctgaaaaatgtgaccatgaccgtgtgaaatttaaattataccttactttttatttttacttctgtggatgccagtgtctgtcttagtctgtttctccctatatacactgtatatggaaaccaactaaaagcctatctaggccgggaatggtggctcacgcctgtaatcccagcattttgggagaccaaggtgggtggatcacctgaggtcagaagttcgaaaccagcctggccaacatggtgaaaccctgtctctattaaaaatacaaaaatctgctaggtgtggtggtgcacgcctgtaatcccagctactcgggaggctgaggcaggagaatcacttgaacccgggaggcagaggttgcagtgagccgagatctcaccattgcacttcagcctaggtgacaggagtgaaattccgtctcaataaacaaacaaacaaacaaagcagcatccataagaaattaacacaaaatatgtttagctgttcatttgaaagcaaatgactggggttataattcacttgtaacacttaataatctcaaagttttgatttgtgaattccattatctcttggagaaagctacaacacacatataattagtggtctaactcaaatagtgctggaatttcctatagaaatggctaagcatgaataaccaaagtcgcaggtgattcctaagattctgctcattttttaagtttttttttaagttttttgtttctttctgctcattttttttacatgactgaattaaaatagcttttaaaaaatttcctgctttccgccgggttgtggtggctcatgcctgtaatctcagtactttgggaggctgaggcgggtggatcacgaggtcaggagttcaagaccagactggccaaggtggtcaaattccgtctctactaaaaatacaaaaaaaaattagccagtagtggtggcaggcacctgtaatcccagctactcggtaggctgaggcagagaatggcttgaactcaggaggcagaggttgcagtgagccaagatcgcaccactgcactccagcctgggcgacgaagctagactctatctcaaaaaaaaaaaaaaagaaaaaaaaatcctgctttccaaagattactggtatcttttactggaaaatggttcctaaagaccataatctaggtgcagtactggtgtttaccgctactgagttggtcttttaggccttttcattatttttaggcctgcagcggacagtatttatggggaaaaaatgttatctgaaatctacaacaatatgttatactgagaaatgatacctaaaagtcaaactcatgactacagggtatctttttaatagattatatgttacatgtgaatcttcttttaccacatcaaaattctgattctcaaatacatgggatgattgaattaaaatatcacacaactattcacttatgttacaccatattacttatgcaccaggctcagaattacacactaatactaccaccattaatagaaaaacagttgtttctttacccacatcttcttctcattcttccccattaaagttactgtcacaacaaggctgtttatttcacctgggtgcaggcaggctgagtccgaaaaagagtcaggaaagggagatggggtagggccattttgtaagattcgggtaggtaaaggaaaattgcagtcaaagggggttgttctctggggggcaggggtgggggtcacagggtgctcagtgggggagtttttgagccaggatgagccagaagaaggaatttcacaagataatgtcatcacttaaggcaaggaccggccattttcacttcttttgtggtggaatgtcatcagttaaggcaggaacaggccattttcacttcttttgtgattcttcacttgcttcgggccatctgggcgaatacgtgcaggtcacaggggatggtttagcttgggctcagaggcctgacagttacagaatctctttattgtcacagcatgtagctgtggaatactatattatcatactttttaccatcgttgagtcttagtttttatgtttctccttaatgctcattacccatccttatatcagtttttctctaggtattttgggtatctgaaacttgttctctagcagattctacaggaaaataatgtgaaaatatgccctgagttattgtacgttgatatttatttcatgtgatcatatctgaatgtcagtttgattgaatataaaatccttgttttggctgggcatgatggctcatgtctgtaatcccaggactttgggaggccaagatgggtggatcacctgaggtcaggagtttgagaccaacctggccaacatgatgaaaccccatctctactaaaaagacaaaaaattagctgggcgtggtggcgggtgccagtaatcccagctactcaggaggccgaggcaggagaatcgcttgatcccaggaagtggaggttgcagtgagccgagatcacgccattgcactccagccggggcaacaagagtgaaactccatctcaaaaatgaataaaataaataaataaataaataatccttgttttgcattggctttctttgatatgttaaatgttgctttattttcctttggcataaagcactgctgtcaaaaaactcttattaaaatatagtttctttgtaagtgaaaaacaaaaatatttcctgccctcaaaaattataaacttagttaccaaaaagcaaaaagtactatgtgtatacataaaagcaatatacattcattaccatcttgaaaacaattatttggatataaactttaaaattataaaataatagtattcattataaatgaatgaaaacagtaatgatttttaaaaactactactcttatcatgaccaattacctcttctttttgaaaagtgaactagttcctaccttaaagactttgttgaccctctgtctgaatacctaaaatacatctcctttcttgccttgaaatcttatccttgaaatcttggctcacaatgctacttcctgtcaagtcttccttaaattcctgagctgaaatcccatccccttcaggcccactatcaactctgtaagagggaggcccacatttcacccacctccaggggctcacacactgtgggtgatcaataaaacgtacacaatgaatacgtaactgaccttttattggtcaattttgtaggacttatttctctgagaatattcaattaactacttcctaaggtggaaatttggaaaagcaatatttaaaattgtttaaatagatttaaatagtaattattttaaatggccttaagtagaaattacaggcgcttttactctatcaataaaaaaatcatagctaaatgtaggggtatccatgcttatgttaaactcaggatcataaatcagtattaaaattttcctccatattttcataaacaattatgtggcgcatatattttattacaccaactataagatttgcaaggcattccgccaataactgttatataaaaatcaactaaacacaaatttatctaccaggatgtttatcacagcatcatttataacaactattacaccaccacaaaataaagaaaaccacctaaatgaccataaaaaagagtaaacacattacagtgtctggtgtgatgctacattaaaaattatgctctccaagaatatttaatttcacaggtagagtattctaaaaatgttaggtgtaaaaagcaagtcacaaaacaggaaacgattaaataacactaaaaacaaaagcaaaacatacatgaaaaaaatgtagactgcaaggaagccaaatggttttgattatttttagctagtggttgtattttctcaactttgtacgttgaatatatgttacttttgtaatcagagaaatttcttttgagcacacatttgcaattcttagcatgtactacaaatcagatgtccattagccttgctattcatttttcaaagcaattactaacaagccttgggacaatatcatgccaaataagctgggtttctttttctcacctatcatctaggacctacagagatagataaattctgtgcttcaagaaaatatcagcaaagcccactcataagccataacagcagtttttcaaaagttatcgtttctttttaatgcctcgttacttaatgacacctgaatacaactccagtaaagaagacaaaactgaagatgtaatgaagtataaatcacccatgctattagagctcttatcaatcaaaacattagttgttaaaagtcccagaaagaggacacaataccaggtacaataattaaaatgaaaagaaacaaaactggaaacggagccaagaaacaccactacgcttccttcttttcaaaatgcgattgttaaaaaagtcagtctcctcaactcatcctctgtcctgagttttagaaagcaaatcaagcaggagccaatgcaattgaggcaattatggaacttgggacagggccaaggaagtgctgcagtgagccatggaggatgacctacctagaagggctccatttttttttttttttttttttttttttttgagactgagtctcgctctgtcccccaggctggagcgcagtggcgcgatctcggctcacggcaagctccgcctcccgggttcacgccattctcctgcctcagcctcccgagtagctgggattacaggcgcccgcaccacgcctggctaatttttttgtatttttagtagagacggggtttcaccgttgttagccaagacagtctcaatctcctgaccttgcgatccgcccatctcggcctcccgaagttctgggattacaggcgtgagcaccgcgcccggccgaagacaccatttttataggtgttcttgcttaatcaaatggaagagggcttcactttctaagtcttcctcacccagaaggaatctgtgagataaatgtaagctcttcccattcttccttctggcctgaaacaaatgtggctgccatatgcaattttggagggaaaaaaaattaaggaagatcaagaatcttcctgaagaatcagtgatgattaatgctgcttaaattttgttgaagatcgtatgaatgaacgttattttcttttattttggcatcatggtgttttcaaaactaaagtgtattttcccatactgtatgtataaagctcataaagtacaactaccaagagataaaacaaattaatgatcattctgtgtcgactttcaagtcttttgacttttttctattatccttcaatggtactacatacaaatacaaaattatatgtactgatttcatagtctatcttttgctgattataaaagctactcatttattatacaaagtcatagaaaattgcttaaataaaatcaaaatcacctgtaatcccactgttgggagataaacactgataagatttcttttccggacatgttttcttttacttagtatgctggttctgaagcatgattaacgttgaccattcaaaggtcccatgggaaggccacatataaaggagtctgatgtctctccaaggatggctgattagcctttcctgatgaagaaatgcccagcaattctggtcattccttatgagaccatgatgtaaacaatcaagaacattcaagaatttgcatccttcttgtatgcagcagctgggctcattaaataatgagaatgatgaagtcatcattctcatcacagtgcatgtataggtcccacacatgcatctcccatgacttcaaaattagtaggatttccacagtgcaggtcggtggggagaggaggcgccatgggcaccaattctctagcacactggattacatacggggatttacaagatccttaaagtctacaataaaaatgtttttccatcctcatcgccatctttaaagtttggtgaactctcatgtgacatttctgactattgtgttgtactgatgtgtctcaagagagttgttgtttacataaattcaaagaattaccctggtataaaatgtcacagtattcaaatacatcctttccatgctaaagaagatagctgtagataattgatacaaaggcagccaagaaacccagaaaacaaggcatgcttttcctaaaattgtattaaaacaataaaattcaaaattaatatgaattgaatacctttctcatttgaccatatctgataagatttctggtcattactacttacacatttggaaggtcttaattacaaaatgaaacagaatgacatttaaggtaaaattctttcacttgtaattccttttttggattaagctattaacctgactttgccccaataattcaacagtaatttattttacgcaatgttccttgcctttgctggtcagagacaagtacagaaaagtgccaatttcaacagtggatctattacaccatgaagagcagtcattcaaatggaaagggttgaaagctttgcaaagaaaatattctccttgagtaacagtaatgatgtgcttgaatcacacatgagataattaataaaatgttcacatgattaagatgaatcttaccctctggttccagaggtactaccaaaagcaaagggtgagatgagaaagccaacttattctcaagggaaattatccactccatgggaagaaagtggcaacagcaacctgacatactttccccatgcagacaagaaatgtatagcacatatgtccgaggcaaaatattacagaaaaataatccagtgccacactggatccttcatctgataaagaggttaggaaggttgtatgccacacataacaagcatttttctctcttcaagctttgttttgaattttaacacgcttaatgtttaagataattttattttgtttgctaggtcagtaaaaaaaaaaaactcttgtctaaaacatatatttggatacagtcaagagattttagagcatacttatgttaatgctgaacagtaattctttgttaagcaggaataatatgtaagaatgttacctactactactataaagtagaaaacatatcacatggagatttatcctatactaggtcatggttgtctcctctgtcaacacaacgatagctgtgagtttcttttttagtgctattgtctctaattcatagtgaatatttgttttaaaacaaatttttgtgtatactgtaaaaaacactggaccaataatcaagagagcttggactgtagtgctgactctcccatttatttgctgtgagttatagcaagaaattcaacctctctggatcttggtagttgtatagcctgtgaagagagacgaagaactaacactgcctgtctattaagtgcaagtaaaatgtacatcagttacacctatgtccctatgttacctatgttacacctattggaaaacctatgtttttcagttccttttcctgaaagacaaggcatgctctacatactctaccaggttattttatcaactctgtattatactctgggcttgagacctttggaaaatttgccactacctaagaaaaaagcagcacctatattccttaattctaatctaaggttaataacaaagtaagagacaacatatgctctacttgtcatattagggtctaatttcaggtccaatggaaaaggaccagtgattcataaaatgagaaaatatggtaaaatgattcaacacgccaagtacctacaggaaatagcaaatgattatctagtcccatagtagtcaagaacagttagtgtcaacgtgctcatttcacatcagacacaaccagaactgagaaatttgcttaacatgtcacaagtgacccaactttttgaattatgtacctccacatcaaaggagcccagaatctgttcggaggatgaaagagaaatctgataatggttgatggcaaagccttggcaggaataaactccttccctgagaaagaattattttataggcttctctccatttctccttgccagtctccagcctgtgcttcacagctgggtaattatctgtcagtggaatgatatattttcaagtggttctctttccataatggttaaaaacataaggtgaggacaggtcattaactttactatcaaacaggtatttggtagatgagattaattatttaaaaccacattacttaggctgttgtttccctaaatggtgcataatgcagtgtagcacaacaaatacaaatatttggacagtctccgtgtaattataatattattataaaatcttctgacttgatattgagatctgagaacatcttttatatcctttattacttgttgtactgttcgttcacttggaggtttttttgtttgtttttgtttttttaagagacggggtctcattatgttgcccaggctggtctctaactgctgggctcaagcaatcttcccacctcggcctcttacagtgctgggattataggcttgagccaccacacccagtggaaggagagcttttcagagatgaggaggcttgaagagcaggggcaaaggaagtgatcaacagataggataaaatagacctggggttcaaaggatatttgctacaacaactggcactaggtagtaaataacaatcttaatgtggatttcatctttccatcaactttaatacaaatcattctgaatagaatatgaagcagaaaaatctatgtaaaatgataagttcacttctgaaacatgactgcagttttgagtgtcataccaggagcaataatgcccatccaaagccctacctgttctcagtgagcttacattctaatgaaaatatatttggaatacttcatagaacaggtaagtaagaaccaaaagaaacaaatcattaacaaagcctggcccatcaaattaacagactcatgatctacttcctaacttgtactgaattgttcaatctctgtgtgttatttcttggtgtaataactaagtgagtataaaatacacagttcctggggacagatgacttctatatttttttgagtaggagttctgtatctagaatttaagtgctgcttattttcatctaattaaactgcactttttgatgaaccagaaaagagttgaggccttataaagcatataggaacaaggaataaggaggaaaaaggaaactcttgaattatcagatgtttaagaaatctagttttctacactctcttcatcaattacattgtaagtaaattcaccaggtgaaatcttctttctaatgcccagtgttttcattttatgtctcaaattatgcacatgaatgaacagcaatcagtatgctcttaggacattcatttttgaccatatattacatagatctccggaatcttcagtaaatatccttactttgtaagtttgctgttggattttctttgaaatattccttttaacctttataagaagtcatcagaatatacatcaatatttgtccacaatctccacagacaatctctatatccttatttacaacctgcctactgatgaatacacttgtggaaaacatctagatgtaagataccagagcaaagaacttgacttctgcaatgactggtcacataaaaacaacaactaggaacagactaataaccaagttagattaaatatggagtatgacagtttccagaggaaaagagcacgataccacataaaactactcaatttttttaaataaaatgttgaggtaaatttgaggtttgtgacaaaacaaacattaaacattagtaatcagactgtttcctccagtttgatgtaagcagaaaaaaagccttcccaattccaattcctctactatcaccaaataagaggagtagttattgtagaacagccttttttttttttttttttttttttttagaaattaacaaaatgctgcagcttcacattagattctttcttctagaaagtctatgtgaagaaacacacaaggcccctgttcatgagaatcatctatgcgatacggtaaaataagaattcccggatccgctactataggcatttttcattcaggagtcctggaactggcccaggaatttgtaatttcaatatacaccctgggtaaattcattctgaggcagggaactcaaaaatactgctcctatagggtcagtgcacagaatgtaactgcaagagtccaaaacacagtacaacacagagtggcaatgtgctgaagaacaagtctgtgtatgtgacctaacaggagcatcctctttttcttccctcaagaccaggcccccaatcaacaccagccccacggccggccggctcacctaagcagcggtagggaatcacaaagtggggatgggtcttgcactgcttgcggccccgcttgcaccagttctggatggtcactggttggttggcttctaccacattggtgatctgcagttcagggtagacctgggagagcacacaaaaagaatcaattgttacttgaggcaggggctggcatttacaagcatctaacaagcctccactgtaaggtacaggtggagtgtcccttatccaaaatgcttgggaccagaagtgctttcaaggtctctgactttttccgattttagaacatctgcattatatacttactggttgagcatctggaatccggaaagtccaaaatccaaaatactccaatgagcatttcctttgagcatcatgttgacatgcaaatagttttgggtttttgagcatttcggactctggatttttaaatttgggatactcaacctataccactatccactaagagtcaagcctgctctacctctgaccaagctaaagaaattcagtacaaagaaaaagatagcaaatgaacaagcatctagctattccattcaaaatattaagcaatgcaactttttaatttattgtactcatttagacttaaaatattatttttccaggggagctaaaatagaaacaagagggggaaaggaggattcttacaagcatggggtgatttttgatgtgaaataaattggtgtaggataatagtctgtaatgtcctaaacaaacgttacagtagatatggctggggatattatgtttagtaaaattcaacctccccctatctctcactaatcggacaaacattttacaggatatgacacatagaaagctttctatataaaaatcctgctcttattccaagtaatttacatgaaaataacttatcgaaaagttatcaagggtgtcatttagataaaaataaactcatgaattctctttgctcctataactaactacagccccttgctttgattactgttgtgaatacatcatggtgtttaactgagcacttagaatgaaatgtgaaacttgatcaattaaatcacatttgtgaaatatcaaaccacttctatttattaatgagtagagatttgaaagaaaaacataaacataaaaatctatttcgaaaatgtgcattcccttgcataaaccttgcattgcaacagggtggttgttttgccagataaataacaacgaatagagaagtgacggtataagcaagggaatgattagaatgctgggccatgcaatctcaagtggcaaaagtgagaacatgaggggaattagacacaggtaaaaggtggtagggaccagtggaatctgagtccactgatcacactccaggggctaaagaatgtatggcgcacaggactggagaaagtgaggtggtaataagtagtacttggagagtcaaataattgaaattaaaattttggaggagttgcagtgattggtcattgcaaggagtataatatgaccattgtaagcaatgggtgatggagaatgatgaaaacaaggtcactggagggatgagaatcatgaactgacaaattggaatactggaaggatcattgagatcaatattaggatcacttaagaatcagcaaatgaagcagctacacctgatgacagcaaggcaggagctaaaatcttcaaagtctgaatggtgaacatcgatgaggtagaaagaggtctggagatgaccaacaggtggaggagcaaagtgatttgtctgaaagcatgcacttcaagctgaggtaggggggcttttagggaagagaaaggaagagtggtttggaaacaaaaatgaagaggaaaagaggaaatgaagaggaaaagaggacattcccacctctaggggcaacgctgtgaggattttgagaaaagaacttcgacctgagaaggctacaggagaagtagtgccttccttggagggagaacaaggtttctgagcaagataacatccatggggagttagacgatacacggaatttcactcacaattgtccatgacattcagagggcttgacaaatctaaattaataatcccttatctttgaataaaagtaactgaatcaggctgaatttactgcttccattttaataaggcagtaggagaactatgcatggcttgatgtcaattgagcgtgactcaatctctgtctaaaaagttgatattttgttcatcatggagtttttttgcagtaattttgatttttaaaaatattacattaaaaattcttaatctcaattcctgactgccttgtttacctcaccttagtcccagaccccaaaaaaatcagttaaaaaataaggtactgtgaatgaataaataacactgtggggtacacacctagaaaatggaatgtcattcaacactaaaaggaaatgggctatgaacccatgaaaagacatggaggaacttaactaatattgctaagtgaaagaagcccatctgaataggctccatactatatgacattcttcccactatatgacattctggaaaaggcagaactatggagactaaaaagatcagtggttgccacgggtttgggtggttgggggcagggggaggatgaacagatagagcacagaagatttttagggcagtgaaactactctgtatggtactacaatgatggacatatgtcattatacatttgtccaaacccaaaaaatgtataccgccaagagtgaaccctcagggaaactatggactttgggtgctaatgatgtatcaatgttggttcatcgattgtaacaaatgtaccattctgtgggggatgtttataataggagaggctaagcatgtgtgcaggtagcaagtatatgggaaacctctgtaccttcctctcaacttttctgtgaatctaaaactgctctaaaaaaccgtctattttaaaaacaaaaatttaaaaataaggtatcaatcagtgtagcagcaggggataaactcagtggtagaggtatatgctaagagaacacacaaagaaatctctaaatcagaatcctggggtgggtgctgagagagttattcttgaaaccactgccacagtaacctagctccaaagggatcctgctattaatacttctctttattttactttgttcttaagtatcttaatatctcaatgcaggcactttagatcacagaaaatgctctaaaaatgccactaaaaatttaatattcccatggcttttttcctatataatgaaaggtgaagtggctttttgtacaggaatataattctcccaccgtctttacttgtttattagatcacaaagctgcagcactcatgagtcataaactgtatgacacctgagagtccaccctgagggacatgactttatgtgcagtaaagtgtgagttactgcatctttctaaagggttcttttcactgaaagacaaccctgctgagaatttcctcaggagtcatcggttttctataaacccagtggcaggcatattcacatcatggttccctctatacaacttaaaaccaacgaattgtttgtagggtacaaactgattaccaggagaaaaggatctctttttcatgttggttgcataccatcttcagattcctatggtaatagttggtgcaacagggcagtaactgattaggttgactatttccaagtaggtagaattgcaaattgacaaattaaaatccatgaagacggggcttttccctaaagactagtactagaactttatacagtgatcagccaaacacagaatttacttccagttcccaccaggaaatctagaacatgcgtgttattttctgtgcttcagcttctctctctataacaccaacaatgacaattgttaatatgcagatggatgtggagattacaaaatttgaaccaggccggagacagtggcacacacctgtaatcccagcactttgggaggccgaggcgggcggctcacgaggtcaagagatcaagaccatcctggccaacatggtgaaaccctgtctctactaaaaatacaaaaattagctgggcgtcatggcacacgcctgttaagtcccagctactccggaggctgaggcaggagaatcgcaggaacccaggaagcggatgttgcagtgagctgagatcacaccactgcactccagcctggtgacagagcgagactcggtctcaaaaaaaaaaaaaaaaaaatttgaaccacataaagcccatgcatagttttttcctactgtcctattaaaatggaagcagtaaattcaacctgattcagttacttttattcagagataagggattattaatttagattttccaaacataatgcaattttgctgttccaacatcaggaggtttatttaagggggagaacattagcaatcaaggtaacaaaacttcttctgaagcagagcaagacccttttgataaagcaactgccacatgcacagccaactcccagctcagaaagcaaacaacgaaacaaaacaaaaaaagaaacaaacacgttaaaatttaaaattccaacaaaaattcccaatatcatccctaggtttttattaaataaccccagtaaacatccagagaggaaaaaaagcctttttatgtttacatagatataaaaatatttatatttatataaaatataaatatatagctcatttataaagatataaatatagttcatttatatttaaagatataaatataaatatagttcaacattttagacaagaataaaaatttcatcagaaatacaaatgttctcgtggctagattaagttcctgatttttatcataactatagtagtcctcccttatctgtggttttgctttccatagtttcagtccaaaaatattaaatagaaagctctataaataaatgagttttatttttctatttatttaattaatttattttttttttgagatggactctcactctgtcgcccaggttgcagtgcagtggtgcaatctcagctcactgtaacctccatctcccaggttcaagcgattctcctgcctcagcctcctgagtagctgggactacaggcacccactaccacacccggctaatttttgtattttcagtaaagacagggtttcaccatgttggccaggatgctctcaatctcctgaccttgtgatccacccgccttggcctcccaaagtgttgggattacaggcgtgagccaccgtgcccggcctatatttaattttaagaaagagatagggtcatcctatgttgcccaggctggtctcaaactcctggcctcaagagatcctcctgtcctggcctcccaaagtaccaggattacaggcatgagccaccatgcccagccaacaataagttttaaattgcgcaccattctgagcagtgtgatgaaatctcaaacccacacagtccagaaagtgaatcatccctttgtccagcgtctccatgctgtacatgctacctgccattgatcacttcatcacagcgcttgtgttcaagtaactcttatttgacttaataacggccccaaagtgcaagagtagtgatggtggcgtagtgtcataattgctctattctattattagttgttgtgaattacttactgtgcctaatttgtaaattcaactttatcacaggtatgtacctataggaaaaaaacatagtatatattgggtttggtactatctaaggtttcgggcattcactgggggtcttggaagttatcctctgcagatataggaggactactgtaagtatcggttcaatgttttaatattttctttgcagcatctcaaatcttacataggaaataaagataaaagttccttaagctgcttaatttgcatgtgttttccaaaacatacatgtattgctaatatgacaagcattgcaaataatttgctaatacagcaaacattagcaaatcctaactctcatactccccttcttttctaaaatgttttttatgtgaaacccaattccaactatttccttgattttcctttttaaaaaaggactcgagatacttatacttaaagcagaagcaaacccaagcctctgtcagctagtagaaaaataagctgtcctcaagtcctacaaattttcctaaattatagccacacagagcatttgctgtataaatacgtacactgtgttccaaacacactcttacctaagatcccttagactacacttcaaatgcctacgcccattagggtccccccacatggacaaacctcctctgcacacagtgaaataatgctaacccctcttacagaatgttttctggtatttatcagtgtgcctcacatcgctattaagtttgtatctgtactgcctgcctggtgaaaagaagctttcctcaagggcagaaaacataacgtggcatgttatagcctccccgtggagccccacatccatcatctttggctttcagactatcaggaggctgctgacccccaactccttttatgtggtgctcccaccctcagctctctgaaggaggactcattagtgactgtatttcaaactctgcagcaccatcccctatagcttattagagcccaagaaaaccaaactgtacgtagcattctttccctcaagggctttcacgaacacacaaaggctgtcgttagataaggaagaaacttgactggaggtgagcataagtctgagccacaggtggcatgtcaacacccatgggtgcatggtggcttgcgcctatagtcccagctactcgggaggctgaggtgggaggacagcttaagcgaggaggtcgaggctgcagtgaactgggatcacgtcactgcactccagtctgggcaacagagtgagaccccgcctcaaaaaaacaaaaaacaaaaacagaacgtaacaaaaaaacaaagaaaagcccccaaaaaaccatgggtggactcaaactaggcatctggaagaagcagttagtccaggaaaggaaaacagggaatactcagagagacaagggaagatgagaaacagacaagactggatctggcagagaccggatctgacagggcctgcctgtgccctctaactcttttaagtcttgggatgtgcatttggattctaggagatgccttgtccccttcaataagccctatttctaaacataagctcctttagtagctttatgctccttccaattgaacaaaagccaagaaaaaggcccggcttgcatgctagttcactaattcccaccacatgatgccctcaatctctgtgcgcagaccattctgtcctaccactgcatcctccacttgccttgatcactttatctgatccctgaccacttgctacctcctattctgctgatgggctgtctgtcctattagaatatataatccttgaaggcagggacaatatgattcatctggtgttccctcaacagtggcaaaccctgggatagcacagtaagtgtctgataagcatgtaattaatatttctggttaaggtcagaatccattcaatcagggactttcagtatacattaagttccctttgggtattataaacctatctcttaaataagatattctaaatagttgttggattatgggcttttgagggaaagtaagtatctcaatgcctttcaatattgttcttccaagtagatatggacagcttatacaaatcatagcatctgctataagcagtagattactgtaaataagcactcagctgaggaaggcatttaggaagagtgacaagttaagctctcacttgggctaatggggcccattcagttagtacaggagtctgaaaagcagcctacctacctggtcatacagccatgttttatcattgaaagtgaatgtatcagtacatgaaataattttaagagtgcataggccgggcgcggtggctcaggcctgtaatcccagcactttgggaggccaagacgggtggatcacaaggtcagtagatcgagaccatcctggctaacatggtgaaaccccgtctctactaaaaaatacaaaaattagccgggcatggtggcaggcgcctgtagtctcagctacttgggaggctgaggcaggagaatggcgtgaacctgggaggcggagcttgcagtgagccgagatcgcgccactgcactccagcctgcgaggcagagccagactctgtctcagaaaaaaaaaaaaaaaaaaaaaaagagtgcataagaaattccaaatcctaacaaccaggaaagagggggaatagaaacaatcttagatcatattatattaatatttttatatataataattattattaatattaaaagcttatcatcggtagcctaagtagttttgtctactgaagaaataccttaaaacctggtcaccatcagaatgttttgttccacattttaaaaatctgaagtctctcttctcactatctctccaagttggaaatatattgatctcagacaagatgacatttaagttgctaaatacgtaaagcaagaaaagacattgatgatatttaagaaagccaagaagagaaatgtatatattaaaaaaaaactttgtaaagccatatgttgtcagagtcctacagaaactttgtctctattcccaacattaagggcaaatggagaaccgaaaagtcccttttgtaaacaggccacctaagacaggtgattaatgccaaaagtcctaaaatgaccaaaggtatttcaaaaacacaaaatcaaacatggctaacaaaaggctgaaaacaaagttaatgaacagagtaaatggaattggaaattgctactaattctgaaaacagtttgcctacttttctacttagtcattcaatttttaaaattcacctttagccaaattcttatttctttttgaaaacgctaaaaattatgtggtactaataaaatgttttaaatatattaacaaaacgtcaatgagtaacatgtgatgctttagcacatcttaatttacaggtcactgaaagagatgagctgaaacccgcatgtgttttgccaggattgctggagaacctgaatagttaagggaaaaaacctgcattccagactgactcaggaacaagactgactagatttgatcattactgcaattcagtgacagatagatgggagggttcattttactattctttctacttgtacatatgcttgtaattttgcatttaaagcactgaaaatttaaataaatacatttagtccagaggaaacagccaggtttctaaatttataactgcatgtgaaaaaggaaaaaaaaaaaaacccagatccaaattgtgtctgcatgactgcagctagcatatatgaatatatacatgaaacagagaatcaaatgctctataccaaattgtttcagagatagcctatcttgtatattttcatcgtctcaaagcttttccataccagtccctttttcaaagaacatatccaagaagaaagtaagaaaaatgtcataactgagggtttcctaagtaccagacatcactgcaaatgttttatgtgtagcacatcataatcctgagttagtaattactccaatttatttaagatgaaactagaacaactaaaatcgatgccatttctaagcattcaaagagtatattaatcataaattttaaactactcggacttaggcatataaaccaagacaaagcatgtcctagacaatatatacttctgtttctggatttcaatgacattctttaaattttcctggaatacaaagaaatatcacatcttaaactattctcaacaaaaattcttttaataatgaggaatactgaaaatacaatctctaacttaattgagaaagagaactggaaaacgaaaacgttctctgcttgcaacttaatgaggcgctgagaggcagcgtgcagctgatgaaacgctactgcaataatgggaggtatcagcatgctatgtttccaaatgatggccttatgtaaaagcaaaggcggtaaaatgctgcagggcgttagaatatttcccaataatctggccaaactctgcttctgacattctatataaatatattgttatatccacactttcatactcagagttggaaaatcctgtcaaagaaccttgtttgatagataagctattctaatttcaaagtgttgaatgaaaaacaaattgtgggtgggagggaagagatgggagagaaataaaaataaataggacaggacacaattgtgaaaacacaagcagatgtgtacacatagcctagattttcctattctctctttcaatgtagggctaattttcttattttaaaatatccaaactgccttcaactttttaaccctagaagaaatctacggtcagtaaagcaatccttacatttatacagaccagaaatgcataaaatatatccacatatagacagcctgatccctccattcaaaaactgtctcactcaatatgaatttgagatctttcaaattccaaaaccacaatgtatacgtgcctatgatttgccaattttcagcctacaagggtgaagggtgcccatagcaaagtaataatggtcaagaatgtaccagaccttctaccataggataatgtatatagtataccttccaactcggtaagattaaaaagactacctctgttgtttgctttttatttaattttaatttcatacaactgtagaatggaaaaagaaaggttgagaaacaattcgtgtctgggaatcccatgttcagttatgtattttagaggagaaagttgggcaaaggaaatggttttgctcaactcatctaacaggcagtttctgctttgtgcaggcactgctgtgctttgtttgctgatcctgttaatctatagattaagcaactgttcatttaaagccagaaggttaaaaaggcagagaacagataatgttaaatggtgggaaagaaaacaggaaaaagagaaaatacccataaaccaataaaagagatgataaagccacgttcacctaactttcccaattggaaatctctgcctgcatttgaggcttaacctgttcaaagttccctccagagacctgccctgcagtgtaagttaccagagacatcaacaccttcaagaagcccctagaccctagcccctagctccaagaagtgcactgcatgttattaaaagaatagagaggctggaagagcctgtttcaagttatctctttttttttcctttttttttttttttttttttttgggatggagtctcactctgtcgccaggctggagtgcagtggcgtgatctcggcccactgcaacctcggcctccgagttcaagcaattctcctgcctcagtctcccgagtagctgggactacaggcgtgcgccaccatgcccatctaatttttgtatttttagtagagacggggtttcaccatgttggctaggatggtcttgatctcttgatctcgtcaccagcccgactcggcctcccaatgtgctgggattacaggtgtgagccatggcacccggcccaagttctctctttaaaagaggaagaatagtatggggactcatccaatttcttgtttaactgacaatatgtaactcttacaacacttgcctgtgtgtttctatcataaagtgaggatatggtttaagactgtgaggatacagtctaagactgaacaggcagccttcctggactgctcgggtgacaaagagcaatgatgcccttaatacagcacctcaggatatcatgaatgaggggatggacaggatgatctcccacaatgcttttcacactattattttgtaatttgaattccttctctccccaatctaatctactcttggaaacaagctaatttttctaaaagtgtcttgaccagaaagcattcatgctaaaaatctgccatagcttccacctatctccagaataagaccctccaatttgcaacctcattctacctttgcaattttctaaattttcttcacaatttaattgtattaatagatttataaggtccttatgggccaagaatggtatcccgccactcagcaacacctgacacaaaaacctaacagtgcccaataaatatagactaaatttgcctgtattaaatttgggaagaaatagattcttgagatgtagaattgaagtacacttcctttattcttctggaatcccaaagcctttggtttaagtaaaactatgtggttttttttttttttttttttttggagccggagtctcgctcttgtcgcccaggctggagtgcagcggcgcgatctcggctcaccgcaagctccacctcccgggttcacgccattctcctgcctcagcctcccaagtagctgggactacaggtgcccaccaccacgcccggcaaatatttttgtatttttagtagagacagggtttcaccgtgttagccgggatggtctcgatctcctgacctcgtgatctgcccgcctcggcctcccaaagtgctgggattacaggcgtgagccactgcgcccggccaaaactatggtttttaaaaaatttcatttcatcccaaagaaacaggacaataaaatctaacaattctaacttttagcccctggttttagaatatgtttcaaggggaatattatttttgttttgttctatttatatttataaattcctcaggccaaaattttggtactataatagtttattaaagcaagtggccactttatgctgttaaatgatgaataactgccaggcacagtggttcgcacctgtaatcccagcactttgggaggccaagacaggtggatcacttgaggtcaggagttcgagaccagcctggccaacatggtgaaaccccatctctagtaaaaatacaaaaattatctgagaatggtgtgggcacctgtaatctcagctacttgggaggctgaggcacgagaatcacttgagcccaggatgcaaagaatgcagtgagccaagactgcaccactgcactccagcctggttgatggagtgggactctgtctcaaaaaaaaaaaaaaaaaaaaaaaaaagatgaataattgacgtagttgtattcgagttgtttccataatgctatgagagatactttttgcttctagtataaataacagaggaaaagcactgttttctatcaaagaatgtcaaaagaaaataacaactcaacagtctactgtggtcatctatgattcacacaaactaccctaaacactaaacaaaaagaacaatataaggattttgcatgcttaatgtgtttggaagcatactttgtaatattacaaccaaatattttaagtcatactatggatttatgactttactattgaattatcatggcctttgcatttgaagcggataaaaacaaactgaaggcaaatctggactacacgccaacattccaccaactcttgcctaaacatgtctttagaattctgtcgatggaaggctgggtgcagtggctcatgcctgtaatcccagcactttgggaggccgaggcaggtaaatcactagagttcaagaccagcctagccaacatggtgaaaccccatctctaccaaaatacaaaaattagccacatgtggtggcgtgcaccttgtaatcccagctactcaggaggctgaggcatgagaatcacttgaacccaggaggcagaggttgcagtgggttgacatcatgccactgcactccagcctgggcgatggagtgagatcccgtcaaaaaaaagaaaaagaaaaaaaagaattctatcaatggatagaaatggtctctgcaaaaggaaagtataggctccattttatgggaagctctctcagcataagctggatacagaactcctgcccattaccgctccaatctctgtgccagaaactaccatccacaagcatttacctaacgacgactagcgtgctctaggtcagagctaagtgttggataaaatccactgtaaggcatgatccctagaaatgttaattctcacaacactttgggtctgtagggcttttgcctacagaagccacagtaggtctttgtcttagctcaaaatgctgccttactgtgaatggcttaaacaacaaaaatgtcttttgtcacagctctggaagctggaagtccaaaaccaaggtgccagcatgaccgagttctggtgaggccgctcttccttgcttgcagacagccacctccttgctgtgtccttatgtgacttcttcgtttgagcagggagaaaaaggcaagctctttggtatcttttcttataagggcactagttccatcacgggggcacatactcatgacctcatctaacagttatcacctcccaaaggtatcatctccgaataccatctccgaatagcctggggttagggtttcaatatctaaattttgggggaacacaaacattcatcccataacagtcctcaatacatacttgaaaaaaaaggggggaaaaatctcaaatggtgctaacacaaaatattttttaaatgcattgaaaggcaggtatttgaccaatgactaggcagaagcaaaactattacgattgggaaagaggaaagaatacataagcacaaagaatttggaagacttgggattaaacaaagactcaatttaaaccataagatccaagttatcttctcaatcaaactttacaagggtttataaccaagagcaaaaataaaagactgtgtttttactttttctcttgaaccttgcccttgaccaaaacctggttcaaagaatcaagggcaaaaaaaacactatgaatgataacaacaaaacaacccagtaacacaaaatacaaattcagagaagcatgagactatgaaaggagcagagtagataattcacagtcaaagttatgtatttatcatcatgttaagctatgcaccaacatgtatactgcaaagcaatcctttggaaaaacaaattaaacaatgagttaaacttgtgagcaaaaagtcaaaacgacgtgacggtgatgagttctgttggttttgttctatcctaggaccagactgttaacagccacctcagacttagccagctagttatctctaaaatattttggtcatgagagacacaaagtgagaacgcaaagtaaaaaattcatccaccactattgggagaaaaaaaaaatcattaaatgagtagctctgtcaatggtaactaatggtttccacgcatttttttcaaaaaaaaaaaaaaaaaaaaagaagaagaatttgcccaatgacagataccagaataccgtgaattttcatggtgctgaatcaaacacccatcaaccaggaattctatacctaatgaagcaattgttcaataataagaaaaacattgttcaacaataagaatgattaagatgaaagtcatccaacaaaacggaatcaaaatattaatgtaatacagggtttgagatgatctgatgaaaagactagctgtaaacaatgagtccagttaaagacagaccctatgaatgagaagtatggcaacagaggagatggtaagattataactttgaaaatataaaaataatacaacttataaaacctgtgagaaggaaacgtggtaacattgtgagagtattcttttccttgccgttcctagcaatgaatccatcaatacggtttaaaaaataaaaacatgaagttaaaaaaaaaaggcaaaacgaacactttccaacacacgcatgaaaatccaagcctacaaatgagaactattcattatttctaattataaaagaaaaacaccagaatagctacaatgtggaaagtggcaggaagatcctgaaatatctataaagaatgttctagagaattcaagatgcacaatttgaaagaaaatgtcaacactgtctaaaacttctgagtgaacttgtctcccctgccacctgctcaatactccccaaaaagccacttaaaatcctaatgcatgatgcactccctcacctcgccctgtccagcctacaagccttttctaatccatacccactgtgttgcagcactggggtcattcttctattttgcccatgccattcctcatccctcttctggcaacagctcctctccccacatcacacggccacacccacaaggccaagatgggctagtcctgatactgagtccctgcagatacggtggtggctccaagggcagacgtgtaactcaaagcagtgccaaccagaagcactccctgataatgcccatgggcagaacaaagttgggatgccaaaccaggactaacactaccagaggtcgtggctaccaacatccctggtctccttgaggacacccatcttagcaggagaaaaggagtaaacacacagcaggaaggtaagcagaaacaaaagagaccctaatggggaaattctaggcagtactgaccctcggttccagcacctagggatctcatttctgtgtacatttttaagaaattgggtaagcatcccccacactacgatccttcccatcagtgggagaaaatattctccatatataaaatacaaattgtttagggggtttttatcacctggcaaaagaaactgcctaattaacccaccctatctccccattcttcctcagaaaaggagatgttccctcccctttccaagacccaggcaatcacatatccactggatctcctttctgcctagttcttacagaactgaataccatagtcatagcttactgtaaccttgtactcttgggcccaagcgatcctctcactcaaagcgctgcgactacaggtctgagccacggagctcggccaaaacctagttcttaagagatacctgcaactagtgcttaggatgggtatcagtccttcccacagtttagtttaagcttccttaggcccaaattccttccatttaaaaatcaaaatcacaaagcctttccttttgtcttcaatgacctcaaagctttttgcctctaggtctttcctccaggagtccacagctgactcaccattgacccacgttgtttttcctgcaatggactacaacgtaacttctccccatgctattccacagggtcaacaatgaccttctatttgccagatcctaacaatgttttgtcacacacacatacaaatgtccaaaaacaagatatgagcaaaagagattgctgggtgtcctagcattgaaatgcaggtgttgtcttgcagaccctgagggtggcggggaaaggattatctgattctacagcatgttcctccagttgacttgctactaaataagctattttacgacttacacccttaaaattcttacacccttattacttacatccttacaagctattccacacccttagagctttgtaaagatggatactgcagacaccccatagcaatgcaagtgttcctgtaccatggaaataatttgacgatattccagataattccagatgattcctgttcatagccatgcaactcaagtgtgctggggaaggaattttaaatctctccaagtcaaaatgaaccatttttcacatcttacagttcatctcattaatgaattgaataaaatatttgacatgtgttcagtctgcatgacagacatgattttaccatgtcaaaaactacacttcaactgctttccgtttgcatcatgcttgcactcttatctttcccctcatttagaaatttacatggcttgccttccagcatgtaacgcctcctacttcctatcctatctctctggccactgctcatctccctcatggggaatcgtctctctttgtttgccttcaatgctgcaattccccaaggtgctttcttcggttcttctccacaggtgtcactgagtgggtaaaatgagtgcaagtacttagcatagtagctgaccctttgtgaccctttgtgaatgctcaatgctgatggtattagtgtcactgtcaccatgtagtttttagattgctaaaattatgattttacaagcttttctccccctttgaagaacaggccctgtgttctgttcatcaatgcacccttagtatccaaagacattatgtctgaggaggaagagagcaccacagggttctagaaaggcatataatcatcttacatccaaatgtatttaatgaaagatgtatttaaaaggaccccaaacaagccttgttccctgacttgcaacatgcagtgaagttctggttgaaggtatggagggactcatttctacctccctctcccacttgccagatcatgggatctaagacccttacagctcagagtcactggtggctcgggatagcacagagaacagcactgttccacggaaacagaatgcaactgcctatggaacctcaatttcctcactgccacgtgaaacgtcaaaagaaacaagtgaaatcaattttaatcacatagttacaactcagtaacatttatgatgtatttaacaacatattcaaaacataactatttcaatgttaaacctatataaaaatgaatgtgatcattttacaggttttctcacattatatctttgagatacggtatctatcttacacttatagcacacatcagtttccactagccacatttcaagtgccaaacaaccacatagggccagtggctacagtactggacagcacacggctagaggctgcagcatggcagtctctgggagaacgaagatatatggtaggggacatagtgataaagcaagaaggtgatttgtttaaatgcaaatctacaatcactcctcttctctgaaaaaataaagtctaggccgggtgcgggtggctcacgcctgtaatcccagcactctgggaggccgaagagggtggatcgcaaggtcaggagttcgagaccagcctggccaacatggtgaaaccctgtctctactaaaaataaaaaaaatcccggcgtggtggcaggcgcctataatcccagctactcgggaggctgaggcaggagaatcatttgaacccaggaggcagaggttgcagtgagctgagattgtgccactgcactgcagcctgggccacaagagcaagactctgtctcaaaaacaaaagaaaaaaaaagaaaaaaataaatagataaaaaataaagtctagtgacttcctgttgctacaaaataaagcccaaatccattaaaatggctcacaaggtatgatgttttggccctttcttacttatggcgcctaatgttgaagaatctggctggtgtgtatcatccaacaagacttccgtgggtgggtggtaggcagaggacagataataccagaattgcaagaggaaggtgacagcaaagggctaattctccccactcatggtggccaccaacaatctggtaaagtccagaactgggaagaaccactctgtgctcaaccctttgatacagtttggctctgtgtccctacccaaatctcatgtcgaattgtaattcccagtgttggaagtggggtctggtgggaagggattggatcatgggggtggtttcaatgtttaagcaccatccctcgagtgctgtcccgtgacagtgttctcatgagatccgggtgtttgaaagtgtgtagcacctctcccttcacactctttctctttcttgctctggccatgtgaacatgtgtcttcttccccttcacctcctgccatgattctaagtttcctgaggcctccccagccatgcttcccatacagcctttggaaccgtgaaccacttaaacctcttttctttataaattacccagtctcaggtagtttattacagcaatgtgagaacagactaatacaccctgggacaaacaacaggctaagacagaaagtaaagctacccaggcattagtaggatctctaagtgaaacgggaaaagaggggtgttcctggggtcaagaagagtaatttttggtatggccaccatacaaatgtgaaaacatctggttattcatacgtgaaactaagggaagaaaaacttagatgcaaactatgacacatgtatcaaaatagtcgattcaccagaaaaggacaatttggtcaatgtcataaactaaattttaattctagcctttaaaaaaagtttatttgacactcagaatacatagtctgtatgcatatatcaaaaaaatggtatcaaaaacatataagtatgcacagagttctgatttataaaatttataacttatctacacaattgtactacaagaactcttcagcagaatgtaaatattatttctaacattgacactttataaaagtcacacccaggcaaaagctgatttattatcaatccatacttagtaaatcagcacacagaatgttcttgtaaaaatacatataatggaccatacgtggtagctcacggctataatcccagcactttgggaggctgacatgggtggatcacaatgtcagtagttcaagaccagcctggccaatatggtgaaaccctgtctctactaaaaatacaaaaaaatttagctgggcgtggtggcgggtgcctatagtcccatctactcaggaggctgaggcaggagaatcatttatacccgggaggtggaggttgcagtaagctgagattgcaccactgcactccatcctgggcgacagagcaagatgtcatctcaaaaaaaaacaaaacaaaacaaaaaatacatataatgaacttaagtattagtgatttccactattcatcatttcacatcatggttcatactcctttcaagataaaaattacttaatatgtaatatattgtgataatgtagatgctttttgcttctcaaaacaccaattagtaattagagcttgtcctttcttaaacagagcgctatcaaaacaaattaaaccttttaataataataattttagtatttacaatttaaaataaaaggatctcaatagaatagtaatattaattaaacaacaaacattcattatccaagtaggctaaagaaaaatttctagtacaaaaaggattacaacaaaagaaaatgttgccaggctatctgctgtttataatgagtgtcgagaattctgctttgccaacaagcataagactaattacttctaatgttcttaagatgcagtcacaatgcagagataactatctaagaagtgtgagataaaatgcctggaactccagctattttaaattgaataagaaaggagcaccctgtatagtaacagcaaaaagactacaaagaattaaacaaaaatgaagatctccacgaaatgacaaaggatgatttccaggatacaaagttaagttaaaaaaaaaaaaaaaaaaaaaagcaaagtgcagaacagtgaactttgtactttttttgtacaagaaggaaaaatatgtattttcttttgccaaaaaaataaatcaggaacaatgaaaatgtttatcaatagagaatgagtgaaaagtgagctttctgagtatatttcatagaactaacatgatagtcaaaaagtaaaattaataagggaggaaaaaaccaaactataatagaatacaaacagatacaaatgaactaaaatatgtatcaagctggtaacagaaaaaaattaatgctagcacttttaaccaaaagaccttgactgtagagccgtggtgagatatatactgaagatgaaaggagtgtggagggctgagcatggtggctcatacccgtaatctcagcactttgggaggtccagccagaggatcgcttgagcccaggagtttcagacagcctggccaacacaaggagaccccatctctactaaaaattaaaaaaaatcagtcaggcctggtggcatgtgcctatagtccagctacttgggaggctgaggtgggaggattgcttgagcccagtaggtcaaggctacagtaagccataatcttgccactgcactccaacctgggtgacagagtgaggaaaaaaaaaagtgctgtgacatcttaaactactgtttagtgatggtcataatacgacatcataattttaaaaacatttatatgtatatcatagggtaatgcaaataaatatattaatggtatggtgaatcattaggaaccaagatttttactgtagggttaaaatactgatgcaaaatacaagaagttaaattttttgaaaacaaatgcatgtgatccaacgtgaattgctagccaccggacaggacttacttcttggcaatactgcaggatgccttccttggtatcaatgcaggttttggtccctgatggatctgaatcccacttcccattctggacattcatgtgcatgttcagtctgccacagaacatggcaatctggggttcagccagcaggccagcattaccatcagtgggtacctgaaagaagaagcttcagttagttatagtatccatagctccaaggcagaggcttggaggaagaacagggataactatcaaaaagagttctattcttgctcattctcaattaggaatcagcccggtcttcaacactcctttagattaagtgttatgtatgctacagatgttcttagccacctataaggcaatgctttcttttatactaaaacagagaaggaaattaccaataccgaaaggaatttattcatgaaaaatttacacgttttcccatatgagattttgtggtacctgctgaaaggttctgacaacaaaattacacgttttcctataataaatataatcactgtggaggctaccgcattcttataataaactccactgactcacacagagcatgatgcctgccaggccctgcctgatgaccaagactgaaaataatatttgtgccacctctcagcactgagagcaagtatggcgttggtagttagcaagtgactgtattatgattttgaacagaaaaattcactgtagaattcaccatccacaaatataactgagtatgttggcgatccctcctggtttcccccagaatattctctggttatcagtctcaactcttaacaagtctgttaagagtgctggtgtctcctctcccaaccatctgcaaggagccaacattttctcatttggagctctacatagtgcctgctgggtagtaagtaaggggtcctagctattaccattgcaggcaatagaccacttcacaaaataacttcatgaaaaagggtgccttctgtattttcaaactcttctgtgtacaggcattacctttacaaaaatatttttaaaagagaaaatggaagtcctgaaatatctataccgtgtcacttaacaggttctggtatctcaaaaagaaaaaaaaattcagcaagaaatgaaaaatatatccacaggagtaaaggtgttattaaaccaatcaattagaaggcatattaatcatgataggccctcccttgtcaaatccagctgctggggaaatgtgagacacccatgccaagaagaattaacttccagcagaagccattcgttcacacactcaagaactgggtgattccacgataacttgtatcattcctaaaaactgtccacaggaggaaaaacaccaactaaaattgcactgagaaattttcagttaaagaaatgaaacagtttccaaacatttcttcccacataaatgtaaaataagatacctctggccattttagtcatttttacacatacttcgtcaaaacccaacagaggacttaggtccttacaacaaaaaaacaaaacaggtcttagattgaaccaagtcatgagtgcaaaagctgctggcaaaatctctagagccatgttttcaagtaacttttccaatatttaacgaaattctgcctttacattgccagatggttaagtcaaagcagccgatgccaaaatatccagatcatctgcagaaatagctagaacccctcaactccatctgagccccttgccacttcctgtgacttccatgaaactggggggtctcattctctgacagatgcaaagcagcaggctaagtagaatgctctataaatttaaatttcacagctttcctgagggattaagaggaaattcattgtcttgatcttagaaatcgaaatgcaaatgttgtcaatcttactgaaataagtagtatagataataacactgcaaaaacattaaagaaagtcaaataataatcagatacctgtggataaggccctacatcagatgctatggagggccctgcccgtaaggaatgtacaatccactaatggaatcgccattgttcccacagtactttattctgttcaccttccgaattcattcctgtcccaaagatttccagtcttggcagcatgttgttaactgtacggagacactaatgagcctttaccatagctggtaaatattctgttgaaacagtctcctcctctgcctcaaactctctctgtacttttgtttatccacaatctgttcattacaatgtctaaggaaagcgttctaccttcttgtcaatacaaatgcacttgattccatttcctccccgcaaggagaggaaattgacaatttctctccccagggtagccagcctccaagaaggcccccaatagtccctgcctcctgctattcatggaccctgggaaactccacaatgtatcagggtctgtctgtgcaacaaatggagtacagcagaagtgatgatggtgtaacttccgagcatgtatatattagacttaaagatgctgcaactcttttaaaaacaaaccctttgctaccagaaaggtcactgaagggcatgatgatgtgtaacatccaaaacaaggtcatgaagggcatcacaattcttcattgctctctgggatcactcactgtgagggaggtcatcagctgccatgttctgagacatttggtgctaaaaccaggaaagtttttggcaaaatacactggatcaccctacctgacaaaccaagtaaatgcttcatttttttttcctcttttgacttaacttcctttgatttcttctatttttcactttgtcatcctccctgcttcttgactttacagctattttaatgtcatctgttggcatatgtgtgtatgctgactatcaaaaagtggtaattttttaaacatttttttcaaataaatttattatgaccctataattgtctcatgttcttgccattttttaatgccatctgttggcatatgtgtgtatgttgactaccaaaaagtggtaatttttaaaacatttttttcaaataacttgattacggcgctataactgtctcatgttgtcttcattttaacaatgagagtttagactagaaaatatatgcttcagttcctgtcaggttttccaccagatgagatttaatattaactttaaaaataaatgtttggagaatcgtgatgattaacatgctctattttcttcaagtggagatcatttaataatttaaactgcgaatcctcaataatagggtaagctgttgaattagaaattgtaaaattggttgtgtgtatagatcttcttacatttgacattacaagaggcccttcacaaataaatatcaactcacaaaagccatgtttctcaagtaaaattttttccccccgaaccaacaccagatgtgtatatggaaatcagagcaattagcttggagatacaaattgaaccagaaaccttcctattcttactgaagcccatctgcaaacaattccatgctttcactacatatgcctgtctccctgaattaaaacaagacaaacaactcacggcatcctcacctgcatcaaataacccatttatgaaacaaagcctggttgctaagcgcagccactccctggcattcagccagaaggaaatgtggccacattaaacattgccatccaagggttaactcccttttcctgagtgaagcctccaagaaatgacttaataaatgatacacagggtcctattcaggatctgttaatatggacactcttaaaattgaaatcttttaagattcaatttacctgccaaatacctgaaatctggcaggtatttgctgccagtaaaaaagcacagtcttacaaagtcatcctaaagataattattcctaattttttaaacatttttattttctaaaagaaaagaaatataaataccttagtagatgggaaatataaccacttaactactacattttagttctatttatgtcttaacactattctaaggtgagttaagattactttgcaaaaatctaagacaacatttaaaagatgagaactgtgatataactggccgtttgtggtctatgcttttctaagactgaatatgaaggtaattcttgtaaactgaatgacttgccactgacatcataaaactggagatgctttcccatgggaaaacagtgttcctgacaatgaacaaaataaccagctaaaaacaatgaagcattcataaattgcctcaaaagcaagaggctgtttaccaagtgctctgaactacagagacgtacatatcaaacttaaaaatgctacaagtcttaaaaacagaaagaaaatatttttgttaccagaaaaaaaatatttttgagccacaatataaagaatactgaagtgaaatggactttccaaagcaatttttagaaatggctttaaaagaggcttaaggggataacataaacgaatataaacatatatacctaatctggaccagtctgcagatgtgaatctggaaaccctacgcctacagttgctacaattttcaattaaatgcaaagccaccttcttgaacaagttctcttgttgtcctttcaaacagggtgttccctttctccaaaaagtttctctctgttatcatctaggagatcaaaattccttatagagcaggcttggcagcattcctccccaacagggtctcaactaggagggaaaagtgaacaaggagctctctgttttgctagctgagaggtcctgtttggcaaggagagggcacagatccatagcttagttgcatccgtggatttatgtaattttaaggtttctggctaatgaaagccatctgttttctgcatttgaaccacccgctgactagtctaaatagctggcctcatataatgaagtatttggtactttttaatcagttcaaacttcttcgagtcagattcttgcataatctcagtatttttttttggatacactgtcacactccaccacccagactagagtgcagtggcatgatctcggctcactgcaacctctccgcctcctaggttcaagctattctcctgcctcagcctcccaagtagctgggactacaggcctgtgccaccacgcccagataatttttgtatttttagtagagacagggtttcaccatgttggccaggctggtctcgaactcctggcctcaagtgatcctcctgcctcggcctcccaaaatgttgggattacaggcatgagccactgtgcccagctttgtagcgatactatttctatcacatccatggtttcctgacataaatactggattcccttaacctgggcataattcaactataccccacaagagtgctttacattttcatattaaaacatttaaattctccattgtcaaatgtaaagaactattttctagaatcataatctagaaaatctgagtgaacccctttcaggggaataattcatctgtagggttttcttttaaatgccaaaaaagtatttccagtgtaagcggaacatctgcagttgctcatttcatcactaacagagaactgaaattaaaatcagaatcacaaaagtggaccataagagggaggaaagggcaccaggtaaggatatgtccaaggccatggggttatagggacagagaagggaattcaacctattccgtcaagggttctgttaatgtgaccgggctgtctctcaaattaaaatggaaaattgcaattttccaaggctttgcccctgtgtgtgtgtgtgcatgtatttgtggtgagcaaaaatagagaagctattaaaaaagaaaaataaaatgtgatgactgaaactgcaagtggtttctatttacccttgtggagagttgccacatctattcacagccactatttgctacacaattatttcagagcttgagtttcggcttaaaaaatgatttgccatgaaagcgaataggagaaaaacaattcctttcagaggagtaatctacatatttcactcctggaaacctgaaattctttttgggtcactgttgatctggcttctaattacaagctatcctcccttgatgtttttcacggcctctgttgatattagattggtgcaaaaatcgcaattacttttgtgccaacctaataccaagcttttttactactcaaaggatagatgttctcaagttgacccaaaactcctacccactcataagaaggccagtaagtcatgcttgctgctggtgcccagtaggaaatcaagaggtccctcaataggagtctttgttattcactactcgtgaaattaataaccaacatttgaagcatgcatttaggcaggacccagtaagagtggcatctactgctaggactgatataaatgaatataaaagtggaattacaaaaaatagagccttatgcatggcaaacaaactcttagcctcaaaaacagtttacaatctagtcaatgtccatttagtcttaaaaggtgaatgttttcttttaacttcatatatatacatacacacacactaacatatatgaaaccatacacatactatatagtatgtgatgaaatgagcgagatgtaaaaagttcatctctttcattctgtctttacagtttttctgtgtgtcttttgttttgtttcgttttctgagacagagtcttgctcagtcgcccaggctggagtgcagcggggtgatctcggctcaccgcaacctctgcctcctgggttcaagcgattcttgtgctttaacctcctgagtagctgggactacaggcgtgcaccactacgcctggctaatttttgtattttttagtagagacgggtttttgccatgttgccactcctgacctcaagtgatctgcccgcctcggcctcccaaagtgctgggattatacgcatgagccacaacgcctggcctgtctttaaagttttactgacatgtctcatacagtcaccaaagggaaaaaaaaatgaaaaaaaaatatatatatagtatttgagatctttatcctattctgactctctcaatattgccatatctcatcagccttgaccttgtgaacatgcagatagaaaaagggttagaggcaaaaatcaaagacctactaaggcctttgctcattatctcatttgactcagaaaaaccaagataagtcacttccacatctatttagataatcagaagggctcaaaacccgcctagagtctactcaagagtgttattccaaagcacatgcttgctttttgacagaacaagccagctggcattcctggtactagatgtcaagcttttttaattcttcaatcttgaatattattttcaagtaatttttcccccatggcagtactattttgcatgtctttgttactggcttttaaaaaaattacttttagagcaagtaaaacgggaagcaaacccacagcttaaatgtctaatttgcatttctcaaatttaaatcactagatgttaatatctactaacctctggtagtttcctctttaagaaatctctcctgaaatgcaaacacaaatttctccaaagttagttctttccttaaatctaatgcagccaactgaatctgcaaagtagaagtccaaatctcccaatgttccaactactaatgtttatcaacccttactttatttaatgtgtattttctagtttttcaacagttgacatatacctacctatgtacatatacacatgtatatatacctgctatacagctacttgtatggtatgtagtgggagtgctagaatgaacacacacacacacacacacatatacacacagtttaagagctcaatttgcacaaatctcaaatgctggtactttgctaagatctcattctagaattagtgcatttaagtccatgttgctaacaaggtggaggacttggtaactgggctcctcagagagagtggtttgaatggcattcactgaaataaatttgatagtaacaaataaatgattttccagtatggcttctacttgttctgacagctaggacagattagcacccagcacagaatacaacaaagaaaaatcaaaatctattattcctcttcatttttggtacaagagatattctacatatattcaatttctaaatttctactgttttatatcaaatgtagccaagctaagccgggatcagctgacccttgagcttgtgggctataataaatggttattgttctaagccactaaattttggagtgagtttgtggctttgcagcatttttgtggcaaaagaaattaacacagtcatgtatttgataggaataactaaaatactaagtgatagaatcaaggcatagattgtttcagaaggtagaaactttctcaagttgcctttttttaggcagctgggagtacaggcccataccaccatacctggctaatttttctgtagagacaaggtctcagtatgttgccgaggctggtctcaacttcctggcctcaagtgttcctcctgccttggtctcctaaagtgctgggattacagaactggtcaccatgcctggccataaatattttatatttaatgtattatgtaaggtaggatcagttatggcttatgatctatacactttgggttgtcctagaattggaaagaatctgagcagaggcaaatagaatgatactgtaaacacatgtactgaagcttttaaggagatggtaatcaatctttgcaatctttagatctgattgattttgtgagcttcttttctcctacattttttagacctctgcaaatgataaacaatttgtacaaaggcatagtttttaaaaaaaattaaacatattttgtttacacaatatatttctaaaaggaaatatttcaaatctgaaagcaatctaatgctattaaatagaccccgttcctgctcatacctcacatgtggctatgtgaatacaaaaatcttataattatacttctcccagcaaaggacatgcaaatttcatcaccaaacattcatgctactgcaatcacactccatcaagccatatgtgttgaaatctgtgtaacaaaagcagtgagggctcttgccacacgtaggctcccgcccagccctctccgggaggtaggtatgtatgcagagaagagagtgggctgagaaatggaattctggcatgttgggtcaagcagactgatcatgtgacactcgcactgagatcctaccaaatttcaccatgtggcagagtcagcaccaaacaaatcccaaagttaaagcctcagttatcacctgggttttgctgcatagacctagccaaatatgtgtaagagttatgagctctagacataatttattttattgccctgaaatagagtatccccacataatttgcaagtttaattgcaattatattcctgggggtcactcctcatacctgcacagttaggatattgccaggttattcatggtacctcacacaacacctggcagttatacacagatcctcatcttttttttttggagacggagtctcactctgtcgcccaggctggagtgcagtagcgtgatctcagctcactgcaacctccacttccctggttcaagcgattctcctgcctcagcctcctgagtagctgggattacaggcgcgcgtcaccacacccggctaatttttgtatttttagtagagatggggtttcatcatgttggtcaggctgatctcgaactcctgacctcgtgagccaccgcgcctggccttacagatcctcatcttttatgcaatatcatattcatcactaaataacgacacagcataaaaatgaacttttactttatcagtggtactttacagcactacagtgagttttctagagtttaaggcttacgctaatatgcttaatgcacaagtaagtgcaaacttaacaggtttctttctggttcttttatttttcccctctatttcttctcattgacccactgcaatgttgacccactcggaacgtagagcatgggcaaaaaaaagaaccaagagaccattagagaagagaataagtctttgaaaagctgcaggtgggaatataatggaaaacaagattccagaagaggtagtgggtctaccatttaactagaacatgcccagtagagccatactgataaatctgcatcttagagttgctgatatacttggacaaggggaaaaagaagcatattcctctatcctttgtcagcccagaaatttatcccaaccctattttcctatacagtttctaccagctttcaggcgtcaggccattgtaaaaccaacataggtggagagggcaattcaggctaggatggggagaggtagttagcgggatttccagttctgggctatagtgagggagtcagtatacactgctgagtctggtacatacattccacattgtccataccctttaatatctttacaatttctaataccaaagtggtatgaaaatactaatgaagttaaagacccttaccaaaatgctaattttccaggttaagttatcatattgtcttcaatgtgcattaaaatctcagagcagctatcgggggataaggagagtgagtacccactaagcttggaggccagctaaactctctagaaagtcatttccatctgacttcccaccagcatgaggcagagcagttcagagcatttttcaagtgagtcggcctgccgttaccaatgccaaatttaaagcacttatatgttttatcacaagcccatgagcttgtgatttcataaaatggtactaactggtccttgccatgagtaaattcaagtaacacgtatgaagaagattttaataaaattttttattagaagattttaataaaatttttttattaaaagattttaataaaattttttattttattaaaagatttcttaaaggtcattaacgcaagtcatattagaagagatcacaggcaagtagacaaaaagaatttactccgtgaaagctcactgaaacaggaattcggatatttgacatttacttttgttcttgtctctcatatgtacacatcaaagcacacacattcacatggatgtaaagatagtaagaggccacctgcaatcagaacaagtgagattataaataagtatattatataagaatccaagacaagaattccttacttttaaggaaagggcatcagagatttatgatcttagacctttacctttctatttttagcagatttacagaaatattgcaggaacagaacatgaagtcacttatttttgataagcacaaaggatatttacattatatcgtctggtttatttcctttcaaagtgtcataacatttactcatcagcctttactgtgtgcttataactctcatactgttgtggttttattactaggatttttggtctaggagaaagctgctttacaaacataatagaaattcagtgagaatattaacttgacataaaaacccaagataattttcaaacagcattcttgttcattgttcaaattgtattctgttaacttatttagtttaagccaagattacttcttttcctgcagacttggaacactaaagaatactccaggtttaaattccaggttatttgcttgataagcctgggtagattgtccttcttaaataacttacaccaaagcactatcaaagaagctctccctttgtagagccctcagattcacagaaggaatttttcgaattgccatttctataggaataaaggctatcaggaaccacaatactaggagaaaataattctgaaggggaggtagcagtgaagactcttatttctattttcttgactatatttataaaaaattgttgccgaaagaacagaagaccaagagccaaaaatcacactgcagtcttactcttggatgtaatgttactatcagtttcagtgacacaacatcagaggcaatctgatattgacaatggtaaaaatatgcagacgccaatattaggagggtgcagttagttgacagtagagcctataagtattcatctaagttttctctgtttgaagagaagaaaagagaacatcaaacatttctagtatatagagcaaggattcctaatctttttttttttttaatgtgcaaacaagacaaaagttacttcactgtctaggggttattccctactctttagcactggcctgactctctcactcccacatataagcattcaataaatacttatgccaacaattaagaaacacctggcatgaaaaataataacagtaataaactagaaggtagaaaatgtaattattgacaaaggtgtggaacaatacaaaataaattccactttagatacctgtgaaattttttattgtggcaccaggagagtaatttcctaacagagaaaagaaaacatagcatccacacctctgtctttaccaattcctaaataccagctacagttcaacttgtccacggacttcaggctcctcctagaaaacaagaaggcttaaaaagcaagacaacctattagctatgttgctcaataaatttcaatgttaatttcctaattctttgataacacattcctgaactcctttgtaattcaggcaacattttaaaaatcagatgatctaactggactccaagaattacataaacagtgtgagcagtgagacttcgaatgtgcaatcaactatttttttaatcctgctgctaaaagccttcagtagcacagaactggttgtcagagatttcagtgtaacctaacacctaacgtgaatgactgctgtacaaaaatacagctgaaaatactatgaggaagagatagaaacggattgttgatggctaagcaaaacagcaaatgctgatggttatcaaacacatgccgttcccactctacacagataagatttcaaagctgtttgagtcctaggttaagttttgggcaagttctggcttgatgccttatattcagataaacattttccaggcagtgaacatattcaaagttggggacagtggggtaacccgaaaacattcctgaccttgatggacagataatccaatggtggagacacaaataaggccaaattggctaaccaaaggtgctggagtgttaatgcagaggtctggcaagggtacaccgaagagctctcaggaaagagtgactggtttgacttggagaaggagaaggaaggcagaccaaagatcagagcagaaaacatgcccaggctgagtatgggtcggacaggaagcatgaaaggtagcacaaggctagcgtccaaatgaccttgaatttgtaataaacgtgtgaagtcactgggagctgctgccacattccaaagcaagcaagagcagcatcccaccagtgtatgaggaggatgcgggggccccaggacaactttcgtgggcctctttctctcttaaaaaaacattaaaagctatattttagggctctgttgattggtataaagacaactctaagtcaggctggattcattattgtatattcatgattattatcttgttctttatttttccttctgattttaaaagaaattaaacatttttgagggctcctaaaggtactgcacagccaagactacggtctgactggaagcaccaggagtaacaggaggcagtaaacaggagtggaggtagggaagattctaaggcttgtaaatttcaaggatgagcacattcggtgcggtgtttagggggtgagtctagagtgctttcatggccaaggtcaacaggcattattagagtgcaccaggctacagaatgtgagtttgtcctgacgggggtgggggagaaaaagaaggaaaacaatcactacctccctgatttattagcaaacatcccattctgtctagccccacatcacatcaggagttctaagagtcaatctggcagagcaattcatctacgtttcattgccttgagtgatgggaacttattttaattttcaaaactagcatatgtttaacagacttgtgcagagctgcctatgtgacctggggaaaaaattatctggactctcaccatgcagattatcagcttgaattgctaatgcattccttacccccgacggatgtctttttgacatgtctacagaggaataagccctaaaacacagaaataacaaactgtacaatctatatctcgcccttgggcaggaggggtattgcactgtgtgggaaagatttacattctaccaaaaaatctaagcaaagagtatttacataagcacaaaaattttttcacaaacttgttcaaataaactaagagaagaacacaactgtgatcgcaaaacagataacatcacatagattctggcttctgactttactgctgttgttcatagcatgtaattctagataataagaattttaggtaattagaatagaagtgcctcttcagatgtgctaaaatgttacgtgcatggctgtttctaaagagggaataatgttggtgtacacctaacgctaaccaactgtgccctaatgaaggtaaatccccaaatatccataacactcactttgttttctgtgtacggccaatctccagtcaagagctcctttaccctgacactagtctcacccatgttgttcagctatgcagtggttctccaacagggtaagcttgttaactacatgggtcctaggccactttgctttttgagccctatgaactgtttctaggtagaggttcaaagttcttggcaaagatgattgtcacgacttgggtggtgctactggcatctatctagtaggtagaagctagggatgttactaaacatcctacaatgtacaggcagcctccgctgtaggccctcccccacccaacataaacaattatttggctcaaaatgtcagtaattcccaggttgaaaactccaacctaagcctttacttagggggaaagagtcatgtcttactgttctctgtatttctatttgttcacagaacaaaattagcattcaaatattggttgaaccaaacagagtttccactcaaaacataattaatccaactgacatcatataaaacaataactatgtaaactgtaaatcctacaaaatacagcctcccttccacagaagcaaaaaaaaaaaacgttaatttttaaaaggtagttggtgtatcaaaagttattaacattaagcaagataaccccttcaactcaagattacagaagattgccccataattatttcatataaaatgatcaaaaataattttattgtattaactccctgtgggtcaatttataatagtaatcttttaattaagaaatcttgagggttaattatccagctttcatttaaaaaaaaaaaatgaggtggtaactatttctgggcaaagttcaccaggaagcaagacaatgcactcataactagggttccaagaccaagcaagccagtcagaatctctctgtaggtaaagactttcaaattctagccaatcatttcataatgaacaacttagacaaacggagaaaaggcttaaaaactggaatctctttgaataatgtattaactctactggaataacaaatatatactaataggttacataaatcaaaagccctatgaaaatatataactaaaaaaattattgctagaaacctctctatgtcttgtatctgcaactatgaacagggtctaatccatcactgtctatatctctagagacctcaggggacttacagctgggtcagggtcactgtaggaactggctgaagggacccacacatgaaagtaccaatatgatctttggaatcaaaaggcaaaagtcaattctgtatttagtaattaccagctgtttggagaaagccagttaactttacctcttgatttcctttatctctcaaatggacatagtaacatcccacctcacaggatattatgaggattaaaatgcagtaatatacataaaatggagagtaagcactttaagagctaatcatattgtctcaacttgtatctagcaggaagagggaaaagaaaagaaaactaaaatgagcacgttcgtaagacatctggggagcctgaactgatgaatacacagcatttgaaatctcctgcgagctatccctacaaagatacctgctatttattcaggaaccctgagagaggatttcctgcactaaagaaaatgctgactatataaccacatatgacacactggtttaaagaatgtcttatgccatttaaaatagacaatctttccttgtttatctgcaagacgtctgcctgccaagttgtctctaaaagagacaaactggtaacgacactgcaacacgtgtgtcgtcaaccccagctacacgctcagtgtggcagatctgactcaccaagtctacatagtatttttaaactatctaagatattttaactcatgcagtttaatggcaattttagctcttttcagaatgtctgatataaggttcatgaagtccactctgacaatttactatccgtgaatcacaatgattctaaacagagctaagaagcaaatttcaagatattaaatttttttggttcatttctttagccacagtattaaatttgtttctacacagaacttctcttgtgtaagaaatttgttattgcatgcttataccactaagttattaaatatatcactagtaatgtatactcaaaatggcccagtgaggtttaagacattcgtttcgaagtatgaataaatgcctcatttcatatctaattcagtgttctcaaaaacagttttcagaaaatgtcaacagttattacctgggagtggggagaattctgtcataaaacacatatgggaaatggatcattcaagatggatactggaggcttttgaaaaaaaaaaccgtaataatgaagtcagtttaacttttttaaaaccaaggtttcccaaaatgtatttgaccgtgggccacttccattgtgacacatttaacatgcttggaactgaatttgaaaaatgtactaagagatttgaaatggatgatcaagcaaaacttaaccagatcattctgagtgaaacaaaataaacaaaaccaaaagaagccttaaagggaacaaaagcaggagtgttaccaagctcctgcagaaatgatgattataataacacatcagatttggctctaggcaaaataattacatgacatgaagaattgagagcaagaaaagagaggattagaatgaaggagtgtttccaaaggcctaaaatatttcagaagcaaatcatgagcattcagaaaatgccaaaagggtacaagtcaagaattttataaggtcccaatgcagtgtaaaattccaggtcttggacaggcaccatggctcacgcctgtaatcccagcactttgggaagccgaggcaggtggatcatgaggttaggagttcaagaccagcctggccaagatggtgaaaccccgtctctactaaaaatacaaaaattagccatgcgtggtggcagctgcctgtaatcccagctactcaggaggctgaagcagagaattgcttgaacccgggaggcagaggttgcagtgagctgagatcacaccatgtattccagcctgggtgacagagtgagactccgtttcaaaaaaaaaaaaaaatttcaggtcttaggtcttttaaactatacaggtgaactaaatcatggtggtttgttccaaactaagttaaattttcacttagcgatataaacgtgagatggctaatgacaagcagatgcacaaattttatcacatccctggattcctaaattgcatttgtgaaattcaataaagtgacacgaagtatagacaataagtgaataagaactaagaacagaaaaagtagaagacatggatatctgcagcaaagcccacacccgaggggagaaaaacattagtgctgttgtttccatgatacgagcacaggttcctacactgatttcacaataaaaaatacaaattacttctaattttcccattttcacacaagtgaaagagagttcagcccaatttctgaattaaattttccttcctatagagggaaggtctttagaaaatctttacaaaatagtactacacatgccttgtgatattagggtgatacggtgataaattaaaagcaacaggtaattaatatgattaatgtaatacccagagaacttcactatttcttaaatgttttcctgagatgttatattgaaacgttgtgctaaatgtcattacataaaatgttgagcatcacacaacagctgacaaactaaccttccaaaaagaaaggaatagatggtcattcacacgaaggttacattttacaaacaaaactggacacacaataccattctgtgatgtttaagatacaacaaaacatgtactgcttttttaaaaattgctgtaatgaggctctcacagttattcacgttttatttagctacaagttttaagatatctgtgaaagaaaacttctttgttttaagttcttgtttgaagatcaccaagcttctatagtgtctctctgaagtggtgacacgctgacttccaggcacaagccaggcacaagagaagctctgcaggaaacagcaaggccactctccataaggagacaggcttggccatgacaactgtggcttagagctgaggagcacagcaactcacaactaatgtctttgaattttaggtaccagcactgagaatcaagttcctttccatgttttaagaaactaataaaatcctcaagaagacctgttttagatattcatgacatttcctaaggcattctataatgttaaaatacttagaaatgactcaaccatttggctaagcttacgctaagggcaaattcctgtttctagatgcgtcaggtctggacagcaccaatatgtgagcttcaacacccagagacttgacttctatttagcaatttatatttttagtagtagccttcccttccttccttccttactatcacagaaaagaacaaagaaaaaaaaattctgcttcaaaagccaaagagttcactactaagaataaattctattatcttccttagactatgcctattactgggtaatataaatatatgttgttggtcagatgcagtggctcccgcctgtaatcccagcactttgggaggccgaggcaggtggatcacgtgaggtcgggagttcgagaccagcctgaccaacatggagaaaccccttctctactaaaaatataaaattagctgggcgtggtggcactcacccgtaatcccagctactcaggaggctgaggcaggagaatcgcttgaacccaggaggcggaggttgcggtgagccaagatcgcaccactgcactccggcccaggtaacaagagcgaaacgccacctcaaaaaataaataaataaataaataaattaattaattaatttaaaaaaaaaggtctgttgtcaatgaagtagtgaaaaggcccgtaaaacaaaacacttcattatttaccaaaggagcaccgaggttttccagcgaaatgcaaccattttattgttcacagtgattctataaacgtttttcctttaagacaattgcgcatagagcaatacactcagtcagtcactcatatatttgttggctctttttactaagccaaaacaaagattattaaactcttattagagacaacaacagtgtaatggaggcatgcttaaataagggaaataagaaaatttatactatactgagtataatttaagcattgatagccaaatgaccaatacggcaatacttgagaaatgtccagtcataagaagctcctctgaacgataaagccaaacttactgacaactgacttgaactaatacctaattcaagtcatctgagagatctaaccaactgttctcatcagtgagaaacattatatgttatctattgcacaatatgactgaaagatagtcatgtcttgaatctcaaatcttcagaatgataaaccacaaaactctactttgacacctaatgtatacagatgaatgtctgtctacttcctactggaatcgtgatagttgaattaagatttttttttttttcactcagatcctgttttcttaaataaggaaaaacaataataaacttaccatattaaacaactaaaaatcagttgtccatagatgacaaatgtgatacaatctagctgtcactagataaaaggttaattttgtaaacagagtcagttaaaaaaataaacaaaaaaataagcaatttaagataaaagtactttggcatggtgagacattacactcactggggccaggagttcaaggctgtagtttgctatgatcgagcctgtgaatagctactgcactccagcctcacatagggagaccctatctctttaaaaaagaaaaaagtgatgtctcaaatatggtgtttgggactcactaaaaataactaaatttaagggggaaagattaaattggtattatatatgccatatgcttaaattctgattttagctcaaccttataattaaatctgtactttgcacccattagacatttcagcaaactgaagttcattcaaatcaaaatctacaaaaagaacaagatcccaaggcactgaattagacttttaatattcaagatgtaaaataggcactcttttaagaaattacttttagttctcctctacctttaaaaaaaagtttctctcctactcgtgaactaattcagaactttacatttctgttacacagcatatgatttctgctttattacttggatatctgtttagtattcacaacatatatgtatctccattaagcccagaattctttgacagatggtctcacccaaagaactcataaatacttgattacttcaacttagtttgcaaaaattaaaaaatcagtaaattatgttacagactatagtattttgagtgttaaaatcacttctaaagaacaccatcacaacagaaccctaaattcagaatcgggttgacatggtctaagaaagtgaataaacgggtaagtgatcttcctagtgcatcatattctacactaaaaattcaccatttatacttcatttctgaaactcaatgtcaaagagaagattaaaaatctgggggctgggcacagtggctcatgcctgtaatcacagcacttagggaggcatgggtgggtagatccctgagctcaggagttggagaccagcctgggcaacatggcaaaaccccgtctctaaaaaaagatacaaaaattagctgggcatggtggtgcatgcctgtagtcccagctacttaggaggctgtggagggaggatcgcttgagcccagcaggtcaaggctgcagtcagccaagattgtgccactgcactccagcagagtaaaaccctgccccatctctcaaagacaaaacaaaacaaaacatctgacagttcctgagtaatcggcagcctacgtaaggaacctattaatactgcatatgcaatttttattaacacacttgccaatatcctcattttaggactagtctaatgtttgtatgatgccagactaattttgaatgtctgaattattcacaattactaggaagacaaatcattagactatggattcagtctacaatcttattctatatcttttggctatgttaactgattaacaactagaataggccgggcgcggtggctcatgcctgtaatcccagcactttgggaggccgaggcgggtgggatcatgaggtcaggagttgaagaccagcctggccaagatggtgaaacctcatctctactaaaaatacaaaaactacagcacgcttgtaatcccagctactcgggaggctgaggcaggagaatcgcttgaacctgaggggcagaggttgcagtgagccgagatcgcaccactgcactccagcctgggcgacagagcgagactctgtctcagaaacaaaacaaaacaaataactggaataaagaaaacagttccctgtccgtatcaaaccaatcagaaccaatataagaaaatgctcttccaccaaaatacagatttgatatggttgaccagataatacatttctcttcctggccctaatctagaacttaacttggttgtgactttgatttctgacatttacaaaatggcattcagtcctttataacccattgacttcgcttatgttgaaattcctttgcaggagtttccaaacatgttaaagtacagcatttggaggagaagcaatgtttgcctcctggactcaagcgatcttcccactcagcctcctgagtagctggaaccacaggtgcacaccaccactcccagctatatttgtagagatgaggtctccctatgttgcccaggctcatgacaaggaatactgcatgccaataatggatgccagctgagtgtcctctaattcaactggattctgacactgtacttggagattacacatcccacaggctgagggctcagtaccacaaaactcccccaacttcagatgtcaatcacaagccccaggttgtagcctgtgcttctgaccaactggctaccattccccagaccccttacttcgttttgattcattgctggagcaccttcagagaactaagagaaatacttgcttacattcacccatttattttaaaggatattacaaaggacacacagatgaacagccagatggaagagatgcacggggtgaggtgcggctgaagagaaaacgagattccatgccctttcctgacatccaaccctccaggaacctccatgtgttcagctatctggaagttcccagaacgcggtccttcagggttgttaagaaagcttcattatgtaggtatcattgatcattagtttatcaactcaaacttcagctcctggaggttggggagggtgactgaaagtcctaaccctctaatcacatggtaggttacccagccaccagtcatctcattagcatataagaccttcttagcactggagattccaaggattttaggagctaaatgtcaggaaacatatacatcaggaagaccaaatagatgccacagtatcacatgaccattttcttggagtcaagatatttgttcttccttaaaacttcgatgtttctaaatatccaaggtatccacataaggttaaaaataaacttctcaccactccacttgtcatttaaaatcatccaacattttaacatttcatcaaatctctatatctatacaatagtgcccatctcttcatgtttttaagagccctgtcctcacactattcttagtgaatagacagcaagagatattattcccttcttacaattatgctctgtgcataataagatagcaagccaaagataaagccaggattagaagtactttcttaaattgagagcttatcagaaggtaaagctggctaacatgattatctatgtaacagcaccagaccttctcacttcgaaattcaagacatctccaaccactcagaaagggtatgggggttgaaaacagccacattatatgcacgacttctataacttaaagatagccaagttcatatcaaactaagttattgaattttatatcactttctaacaagtaatcatagaaccatgacaaaacatacaaaatacagaagttttctccttgacttggtgcaaattcaatccaattactccacagacctcttttattttagtcactcaaactttgatttttcatttccttagtcgtacattaggacaaatgcaaattatatacagaaggcagcacatttagccttattatctcaaactcattcctaagcaagtacatctgcctggatggtgaggcctccatcagaggttaaatgcaagccctagctgggaaagttactggaagggcatgtgtcctacctgcctttctctctcatcatcccagatctttatctccccaatgtcaccacattaggagtgttttgcatataaatcaaaacgaagccccagagagcccttggtaggaatatctggacttgtgttttagaaatagttttgtcagccaggcacggtggctcacacctgtaatcccagcacgctgggtggccgaggcaggcggatcacgaggtcagaagttcgagaccagcctgaacaacacagtgaaaccctgcctctactaaaaatacaaaaattagccaggcatcgtggtgcacacctgtaatccagctactcaggaggctgaggcaggagaatcgcttgaacccaggaggcagaggttgcagtaagccaagatcacaccattgcactccagcctgggcaacagagtgagactctgtctcaaaaaagaaaaaagaaaagaaaagaaaagaaaagaaagaaaagaaagaaagaaagaaagaaagaaagaaagaaaagaaaagaaagaaaagaaatagttttgtcacatacacatctgtgatcctctcactctgcacgccactgcctctctgaaagaaccaacataccacacaggcacgcacacgatggacaatatacagccaccgagcaatcatatacatcttttaaaaagaaacaggcaatttcatgattctactgtaccctggatccatcaggctttatctagggagtgctatttttaaaatatgtacaggcttttttaggtcctcagtaagatcatggaagtgttttgctccctaaggaaaactgaaatttgaggtataagactggagttttacacctctagaattcatctttggtaaccatgcccatttgatttataaataatctaaaaatatggatttttaaggagcagtgtatttaccttagtccacctcatctttttcttttcaggaatgttatcacaaaaatgtgtgctgattacttccttgtatctgagctttgagcaacttacaaggcagacactggacctaaaacacaggttggttgttttagaagaagaaaaaaaaaaagctggttttaaatctggatttaagtcttggccctgactccaaagcaggccagtttatgtgcctgtcttctgttgccagatctgtagaaactagaatgtcattctccgctgagaaaccacaaactagtttccttagaccattcgtcttcctttttgagacagtctcaatgtcacccaggctggagtgcagtggcgcgatctctgctcactgcacctatgcctcctgggttcaagagatccatctctgctcactgcacctatgcctcctgggttcaagagatcctcccgcctccacctccgcctcctgagtagctgggactacaggcatgcgccaccacacccagctaatttttcctattttcagtagagacagcatttggccatgttgcccaggctaacatcaagtgatccgcccacctcggcctcccaaagtgctggggttacaggcatgagccactgcgcctggccctccttaaaccattagttttcaaaccgtatttgaagttcctcagaggtgcgccagtatttgagagaaggttaaggtttcaatgagagcaaatgagattttaaaatcttttctataaacgggggttctatcccatctaaattttgcttttttatgaaaagggttactgccctttttttaaacctaagtaaaaacccataccctttactttgttacaggtgtgttataatttcaagttgtcttttaagtatgagataactttcattgttacaaaacaagtgggttgggagtggatcaacgagacggaggtttgctccttcatttaacaaagaaacaagaccagagagctctttcctcactgggagttagaaatgaccacagacgctaagaacagaaagcaagacaccaaaactaagaaaggttttaggagctacaatctctcatttagaaactccagatagaattttaaagaaaaaagtaaaaacaatatatttctacaattcaaataatataagtcagagtaaaaaacaaacaaacaaacctacttagcacaacataaaaatattctggttactcatcctagagatttaaaaaaaaatcaggaggtgaggcaggtcctatttttgttccttcatttagtggatctgagtcatggctgttccaatgattttcctgatgaaacaaaatacatgtttgttccatcaacaaagggctaccctaggaaactcatcttctactgcagtaagaagggtatcataggtattttttgtggttctaatgggtactcagaaaatccttatgtgatttaatatactcttaaaaggaccgtctgaaaccaaaacatgtactaatatccagtggcctttctctctgtatactggtttaataataacattctgcatcaaatcctttcagaaacctatgaacagaagtaaaatgatatgatacctgagaattattttaaaatgcttcagaaaagaaaatggggcagggggaggtgctgaaacaagaacagcaaaatgtggtcaatttttgaagctggatgatgtatatgtctgaaatttaacataataagttttaaaatcttcttagagagttggcagatcatatactatacacaaatattgtacatgttataggatcaaaatatgggattaaactaagggactgaaactacttatagaatgtcattctcaagccaggcacagtggctgatgcctataatcccagcactttgggagatttcttgagcccaggagttcaacactagcctggccaacacagcgaaactctgtctctacaaaaaaaaaaaaaaaaattagccaggcatggtgttcctctcctgtagtcctagctacttaggaggctgaggcgggaggatcgcttgagacaaggaggttaaggctacagtaagccatgatgactccatggcactccatcctgggtgacagagagatagcctgtctcagaaaacaaaacaaaacaaaacaaaacaaaacaaaacaaaatcctcctgcaaatattctgttggtggatagttttcaatgtatacaatacagtcagtacctgttactcaatatttatccattgcaaacacaacacagaaacctaaggaactcaaaaagcaaactgacatttgtcaggaactgctcccttgttggtcaaagaagaggaaaaggagggctttcttcgatattattgtctactttcttggtaagcaataaagtgtttgcagttttatgtagactggcggggtggggcggggaattgtgacacggttacactttcgtatatatcaagttactcccatacatgattttaggtagagtctgtattttaatgtggtagaaaggggtgattagtatcttgaactgcagaggctacaaaaaacaatgatgcaacattacgtaagggatgagaaataagtaaataagtaaaaaaaaataagtaaattgaaaagtttgttaatgcacaaaaccaagtaactggagagaaaaggacagaagagtcaaagaatcaaggtccccagacctagagtgagaatgtacattatcgtgtgcataccttaatctcaaatataagctcattatcaaataattgtgcaaaaaaatcatctgttaccttgtgaaggatagaaagggttatttcttccaaagctcaaaatgtggtccacagataaggtaaggttacattagtggttctccaattttaacttgcaccagactctactcaaggttttgttaaatagatctctgggcccactcccagaaaacggtttgagaactatgtgtttatactatggctaattcttgcaaatcatctgattttgaaaccagtcacaattttttgaaacattctatgagaaacatcttattaataagaattttcaacagggctcagtggctcacgcctgtatcccagcactttaggaggccgaggcaggcagatcacgaggtcaagagatcaagaccatcctggccaacatgatgaaacctcgtctctattaaaaatacagaaattagctggacgtggtggcacacacctgtagtcccagctactcaggaggctgagggaggagaattgcttgaaggatgcagtgagccaatatcgggccactgcactccagcctggcaacagagcgagactccgtctcaaaacaaacaaacaaacaaacaaacaaacaaacaaacaaacaattttctggcaaagtaagagtattttacaaagagaacaatcacactggtagagaactgcactgcatggatggccaaattaaatcattacaccaaataatttgcaaacttcatccctactttggtcacaataagtaacattgtacttttgaaagatattactgtctgagaacagagtttcatcttacccaaatacagactaaaaacaatgccaacttcacagtactcacttacatagttgataaacagaaccaacaagtcctctaattggtccatttgaatctggggaagagctggctccaatcattgtcaattacatcagcaactgtggaatactccctgagatcaacaaactgttaactgcagtgaccacaacttgacccaggccagagcttccatcctcgggagggtgagtcaacagcatgtcaacactaacccaacttctaccacgcacagcaaggctgtgctatttaggcgtggatcacacgcacactgcgccaacttctaagctaacaatggacaaccaaagcctccggaactctgtcttgggtagagtaaatcaatttccttttgtaggattttcttggcacaaagccaagtgtcaggggctgtggagaaggaactgctggcccaaattccatccaaggttgaccagtggtttaatcccttctctaaatcaggcctctggcaaaacagctagaatcaggaagccaattcatatttaacaaattcaaagtctatcacaacacaggaacttgttaggcaagaagataactgaatgaacacctttaaaaattctgcttttttaacaaaagctgtctacattattttctcatgggagttttggtactagtgttaattcatagactctcccttaaactcaaataaattatctattgaaagaatggcaagaagtactgccaaacttcatagggtggttgggctaaatgttctcaagttcttttccaacgttaaaacaaccggattataagaaacaattcatttaatggagcattctggaggagtaaagacagaggatttggaatgagactgcataggtttaaattctaacactaactgtaattctggccaaaaggttatgatgtggggtcctcatctgtaaaatggagtatctatctcatggagtcagtgtgagaattaaataagcacataaatttctcaacatgacgcctggcacctagtcaacactcaaaatagaggaaggctaataatgatgacatgcaaatctgatattgcaaataccaacgcaaagagtctaatgaaaactttctaaattatatgtcattggttcattatttaagcttctgaggtttgtacaagcacagattaactcaaatgttacttaacgttttacatttactataaacaccctgatgatgtattttacagtttcttgatttttccctacagtttgggcacagtcttattatgacagaaaagaaagcaacaaacccaaaggaaaggcttttccctagactgcttttaattttctattaactgcccaattttgaaaaatagatctacaaaactgggttctggatgactgagttcttttactttggggacaagagctgatgctaaaggagaagacagaggattaagaaatttacattctgtcatttacaaacatgggtatgaacatgaacagagcctctgaaaacatctggcaaatagaagacactatgagccaatcaatcaccaatgctggcttagtagtcatattaataaatacttgctgagtatatactatgttctctgggctgtattatttcttttacgcctcacaacaaccctaagtttggtacttttctatcggttccagtttacaaatgaagaaacagggaagagtaaggggagttttcaaaaagaaataatatcaacagttattacatcaagggtttcacaaatgaagcattcaaaaattcagaaaggcaatgaattgctttgctagacctgtggaaggccctcaacctgcacaggtagccaacacccggtacatacccaattacatccagttaggtcacctctgtatggctgcaaggagccagggccatgtgtggtgcctagccacactatatacataacctgggaaccatgcagcaagatggaagaataggaaacagtatccagaatccagatgttagatctcaggggtagggtatgcacaaggagtatttgcaccatttaaggtgataacgctgctgtctcatggcaacatgcggggcagtataagaggcttggtaaatatccactggaccttccctaagcttagcacaatgcgtcctggatggagaaaatatcaaagccaccaatctgagcatgttgtggaaccagagagacttaagaggctgcaccaccacacagccctcactcgatctttctaggctctgctaagaatgttgctgctggctcactgcagaaactaacacttactcaaagatggtgcatcctgtgcttattttcaccaagcctcatatccccttctctgccagaccattttaataccattagatacttccctattcaaaattaagacagtgtcactggggccaggcacggtggttgatgtctataattccagcactttgggagatagaggtcggaggctcgcctgaggccaggagttcaagaccagtctgggcaacacagcaagaccccatctctacaaaaaatctttaaaactgctgggcctggtggtgcaaacctgtagtcccagctactcaggaggctgaggtggcagcatcgcttgagcccaggaagccgaggctgcagtgagctaagaccacaccactgcactctagccttggcagcagactgagatcctgtctcaaaaaaaaagtaaagaaaaagtgaaaaaaaacaaaaatagtgtcactcagcatcacttaagaaaattaataaaaataggtactacctgtatttcagagataagtaaaacttatgttgaaatggtcaatgctagatttttataaaaagatgtccaatttttaaaaactcattcaagttataagaaattttataatctttattccatgtcaaagataggcattagaaaaattcagtattactttactttccataattgtcaacttttataaacaatgtggtggagtgggaattaaaatctgataatagttttgatccataaaatgagtgggaaaatcaattttaaggcagaaaaaaatgcttcaagttaaacacttactattaaatatttaaacaaaaaaatgtaataaagataccttcaaaactggctgggtgtgatggctcatgcctataatcctaatatgtcgggaggccaaggcaggaggatcacttagcctaggagtttgagaccagcctaagtaacatagcaagacccagtcttaaaaaataataatgatgatgaagttttgataatcaaaagttattatcccttttggctttaccatagagctacagataggtgtcctggttaggtcacttcttttattcttccctagctttactgaagtataattgacaaaaattatgtatattcaatgtatacaacgtgatgttttgatatatgtatacactgtgaaatgattatcacaatcaagctaattaacatatccatcacctcagagttactttttttgttctgtgtggtaagaatatttaacatttactctcgcagacgttttcaagtgtacaattcactattattaactagtcactaggctgtacattaggtattaatctcataactgcaagtttgcaccctttgaccaacatcgcctcacttcccccacatccaaaccctggtaacaccacccttctactcttgtttccatgagtttgagtgttttaggttccacatataaatgaaatcatgcagtatttgtttttctgtgtctggcttatttcacttagcttaaggccataagtaccaggggcctggatttcaacctcacccctattgtttattgctacttgggtcaaattatgtagcctccctgtattaatctgatctcacgctgctaatgaagacatatccaagactcagtaatttataaaagaaacaggttgaactgactcacagttcagcatggctggggaggcctcaggaaccttacaattagggtagacggggaggcaaacacgtccttcttcacatggtggcaggaagaagaagtgccaagcaaaaggggggaaaagtcccttataaagtgatcagttctcgtgagaactaactcactattaccagaacaggatgggggaaaccgcctctatgattcagttatctccacctggtccctcccactacacatggggattatggggactacaattcaagatgagatccaggtggggatggagccaaaccacatcactcactgaacctcattttgtttatacttcattttgagatagtatttgctctgcctttctgataaagctatgcagaataccaagttagtacctggtttcatatatggtttataatacattattcctgatacaatctcaatttactgtttttatacagcctattactgcacaaacattttatatcttaagcaatgtggattttattataatctcctacactaaatagttataaaaacattagctattggtttgggaaaggctacactcaatcttaaatttaaaagtcagttacaattttccattaaaaaaatacaaaataagctacagatgtcttatcatggtcaattctcttgaacaactttctgggttaaaatgcagaaaatataacagatctcagtatacaattcagtgggagaaagaacagttccactaaactgctttcttctgacttaccatgagaattccaaagatagcattaatgtcaacttgaaaaatgatattacaagcaccaatgctagaaattttagatcgagggagttgctccttgatgttcaatgtgctgaacaaagtaaagcaaatgggcctgaagtaataatttatgcttccagtactttcaaaagcaagttttgatataagaatcagttacccatgaaaatagatgaaattcactgaaatgacctagttttataatacaataaaacgttcttttcaactttataaaagtaatgttcctctgaagaacagctgggaggattctagatatcacatcaaaatacgtgccttcctaacattagagatgttttacgtggaatgggatggcttgcctgtgggatgaagtctctggggagaactatcaaaagctggctgactacctaccaggaatggcagaaccaaggagtcctacattcaagatgtgccaagagggagcagcctctaaggcagtgatctctaacctttttggcaccagggactggttttgtggaagaccatttatccatggggtgttgggggtgggatggcatgagactggatgggatgggatggttttgggatgaaactcttccacctcagatcatcagacattagttagattctcacaaggactggaccaggcaacctggatccctcccatgtttagttcacaataggttttgtgctcctgtgagaatctactgccaggaagcagcactcaggcagtaatgctcactggctcacctgcctgccactcacctcctgctgtgtggcccggttcctagcaggccatggaccagtacctgtccatggctgggtgttggggacccctgctctaaagtatctgcgtacagttaaaaagactcaaatagtacaaaaggtgataatatacaaagtaaatatgtactaccttctcctccattccaatgttctcattgcccagagtcagattttgtcagattcacttgaatctgctactgacataatacacatataaattttctgttttttatataaattactgtttaatctgtgattatgcctgcattctgaatgttttcacttatatcggtatgattttagatatttctatacatcagtatggttatgcccacttttaatgtatcagcataatattctactgtataagagttttttaaaggcttgcttagttgatacaaataatgctctcataatatcctcatctgtgcgcatttatacaatatactatgaactaattagtttctagaattcctagatcaagggatatgtacataaaattctaaatgactgatctaaaaaatttctgtaccagctgcatgcagcggctcatgcctgcagtgggcagatcacttgaggtcaggaattcgagaccagcctggccaacatggtgaaaccctgcttctactaaaaatacaaaaaatgagccaggcgtggtggctcacacctgtaatcccaggtactcgggaggctgaggcaggagaatcacttgaacctgggaggcagaggttgcagtgagtccagactgtgccactgtactccaagcaaagaaatatctgttatcaattgacagtagatgaaaatgccaatctggcaagcctttttagtctttgcccatcagggttttaaaaaacaatgttatatcactgttttactttgcatttccctgacgactatgagattgagcatatcttcataggtttattggctgtgtattttttcctgtgtactataaaattctttgccttttttgtccacgtctaatagagattctgttagacatccacactgaaatatttatacataaaattatagaattgaaattatttcaaaataacccagtgagggaaaagagaattgagcaggttgagaaaggggaatacagataaaacaagactgggtgagagctgatcattgctgagcattcagcgcactattctctcttgtgtatgtttaattcttttcataataagttttcaaaaatgttcatttttctctgaagatgttcatatttagtatttcttactgatttgtaagaacacttcatggaataaaaaagtttgccttttgttgctgacaaactgtactgggtacataatactaggtaatccagtattggtactgggtaaataattacccaccttccttctatgtacagtcagataacccaacaccattaactaaataatccatctttcccctttctgatgtaaaaagacacttttatcttgcactaatttccaatatatgcacaactttatttctagacttccagtttgccccattgacctatctatgcatgggatgtgcagttttaatttctatatctttacattttgcttctggttttttattggctattcttacctaatggtttttcccagatgacttttataataattgtattaattttcctaagtatctactacacttataaacacccctccctgcagaactccttcccaaagacagagagcctgcttttctctttcacactggtatgtttttatgtttccacctagggtctcatctgttgcatgcaagctcagaattcacttgacatgctgatagcatataatgttaaagaattcttctctcagtgtaaaaaatatttagctactgtggaaggtcaaactgctaaaaccgactggtgtaacatttgaatgctgccctttatataagctttatttttataaataagcatctgactagaaagtcagtaaaagagcatgatataatcagtctgaagcccagtgttttaaatataatacactaattttagacccaagtattttagttttgctttattgtctacagtttcttaagaagatgtaacttaaaagaaaaaaaaaatcttttaaatggctcaatcaatttattagaaataagcggcaaagagcatctgttcccacagagcaactgttaagttaatccccattaagtcggcctcaaagcacttggatgcagctacaggatgtgggtgtgataggatcacacaggcgaacacctgatagggccttacacacaccgggctaatcagaacatcaaaaaaaaaacctgaagtctcttggaaggactgaaaaatccaatccctccccaacccccccaaaaaaacctcccaaaacagactattccattcaattcagattttgtgaattaatgaaatttaagagccacctgaaaccaccaaagatacacagtgattttctcccgaatctaaggtccaaatgacacaggtagaaaaatgcactgataaaatgttaacaaaaatgcatgtctaatacttagagctacgtgtgagcaggttttaggagaaggatattgattctccctgaggcatgagcattacccaccatttcaggaagcctctgcaagtggagaagccacaaaccccttcaaaaagatctctcaattacccacttcccagtcccctctgatatgtggtaaacaattatttcaatgaggttggcagagatttttcaaagctagcaggcaggcattttgcagctacctccagctggtccaagcagccaaggctgtcaccagtgcctggtcaccgctgaaaacacaaggaggggcaggactagggcaggagagtagatggagagagctgtgtcccgaaccaacattcttgagattcctttgctagtgttttttcttcagggttcactgagaagaggaaggtcagatggggagggacaaaacccaaggaaatgaggctcatttcaaactctaacaacttgatcacaaacaaaatgtatgtagaattacaaataagttattctgttttcaggcatcaaaaatgttatcaatgaaatgttgagatgctaaagcagtgaaatgtgaaacgaagcagtgtcacaggcaactgggcctctcccctggcccatcccaggagggatgaagggtggctgatatgaactctaaggattattctgaaggggccaacaaatgttacaaagaggctcaaaaataaaaatcagaaccatttttccctcattcatccagggcctactcctggccatgttctgtgctttgcactttattcaatttaattcaatttttctcctaagcaatctatttagatactttgtagatgtggaaattggtttagggaagcttacatcattttcttgcagtcatatttctagtaaattgaaagagttgtgactcagatccaaggtctgaatgactccaacatccacactcagaacttccttcacttgggattgagaaaaagggaaataatggaattgggagggggagagaagacaccaagtagagatatcagcattcagaacttcctgcaggagagggtgaaagaagctggcagccaggaactgagggccttactgattactttagtatcttaccaatcaattgcattccaaggcttgcttacttaggaggctgactgcttagtccaagaagaaacactggctgaactctttgacttattttgctggaggcagagaagataagtggttaagagtaaagacaatgaaaacatagtttaaacccagtccactggccagctccctcccagctggggataacagtaggtacctcacaggctgctgaaaagaaaaaattaagtgaaagcacttttcaacaaggcctggttcatagaatgagctacatacagtacctggtaattagtattactattgccacaaccaaggaggcctctcagcaaactatttttacatatgccagaaatacagttattttttccagactaataaatcacaaacaatatggcacggttgaccgccaggttactgatgcaatttcttttcactggaaccaaaaaacaaaaccaccaccaaatctgaactaagtataatacaataattctccctgtcttaaattttaaaatacagaagaaaagatgaattgctgtatactctaaacgctcttttaaatgtttggagtacagaatgtctttcatgaaatcatcttgattaaaatgtacattcttttccaagaagggagtaaactgagtatggaagaccctcaccattagtttttataaatgattgatcaatgggaatcgtcactgaaaaattgcatacaatttttggaatgaatgcaaattgatggaatgtttgtaagctcatgtgcttcttccaacaccccagcatgctcccacctcacagcctttacactgtattgttctctccaggtttaatacttgtagaaaaggggaaaaaaaccttttttctctaccctgttaggttcagcacatgaggccttgccaattaaactgacgagacagattcgcaggggaaaaaacacaaattttatttaatgttattatttttacatgagggaggggagaggagggagctccacagaaaagcaaaaacccaaaagaagcagttaggcctgagagcatacacaccattttaacaaagagcaataaactgtggagaagtcacaagacaaaggagaggggattagggcttccaggggaagtgtggtaaggtaaatatatgggggaaactaatagaagataagggttatttcaataaggtttgtttctgcaggcgatggtgccacctctagtggtctctccagggatggagaggggaaggaggataccttcacacagcaaaatttttataaaaagggggtaaagcttgtcctgggtctgctatttctcgattgtcttcagctcaaattagtactttgctgaaatggcatatttgggggtagcatattctgatccccttcatacccttccagactgtgtctctatccagctcctcactggcttaatttttcttcatagcactgaccaccaagtggcacagagtatactgattgacatctagatagacagatagatagacagatagatagacagacagacagacagattgactgatttgctctctgccccacccaacaaagtacaagctctgtgagatcaggaagctggcctctttcatggttgtatcccaatgcttggcatagtgttggtgttcaattaatgcaccaaataaatgaacggatttccatattatatcaatattttcttacaattagaatttctgtgatgttgatagtgtaagaatttgtttttattagttttcaacagtatcaacatttactcattatgtagttacagtattgtatttttttaaagtaaacaataaacaacactgtctttgctccaaatacctataatgtgaaatatataaaactggccgactgaccacagaaacggcagttaataatcaaaattacatgtgtctggctgaatggactccacgaccttacactaggttctgtaacagcagcatttcatcacaatttgttaaatttgaagataaataccgtctcttttctggtcaaagattcttatatctttggaaacttgacagaattaatgtttttgacttgtttttcaccacataacatcaggagagactttaacagcagtgaagtggcaaggaggacgctttatttatatccgtgtaatcatgtaacccacttcatgctcccactgaatggctccagtaaactgaaatcacaatttcactaatatctacattccagctccagctacatttgcctgtcaaatgcaacaacttacagttaagcttctgcctacacgagcaatcacagaaccattaaataagaggattgcttgtttgaactactagatcagcctttccttatttttgctaatctgtgtggtgtacgttcattaccttttttttttatgttaaagaccaccatgcgtaacactacttgacagcagcaatttatagcagtggtccccagcctttctggcaccagggaatggtttgatgaaagacaattttgtggtttggtttcgggatgaaactgctccacctcagatcatcaggcattagattctaataaggagtgtgcaacgcagctctcactttcttacatgcggttcacaatagggtttgcgctcctatgagcatctaatgccctgctgatgtgacaagaggcagggctcaggcagcaacactcactcacccattgctcacctactgctgtgcagcaaagctcctaacacgccacagaccggtaccagtccatggcccaggggttagggactcctgattcacagcattacaataaataataaataattaaaatattacctgatatttggcaaacaatccctctctaagtcactacttccagcctatgttcaggctagaaatgccaaataaaaaagcacatgtctgtctgggcacggtggctcacgcctgtaatcccagcactttgggaggccgaggcggggggatcacgaggtcaggagatcaagaccatcctggccaacatggtgaaaccctatctctactaaaaatacaaaacaaaaacaaaattagccgggcgtggtggcgggcgcccgtagtcccagctactcgggaggctgaggcgggagaatggcgtgaacccgggaggcggagcttgcagtgagccgagatcgcgccactgcactccagtctgggcgacagagcaagactccatctcaaaaaaaaaaaaaaaaaaaaaaatgggccaaggatctgaatagacatttctaaaaagcaaatgtacaaacaaacaaaacaaaacaaaacaaaagcacaagtccacaactacatagctccagtttccctaaacagatttacccattcagtaaacattacatgtacaaagaacttaaaatagtatgagatttaatgttaagaaataaaatgtaggatctaaaacgtaatctatagcataatctcaaaaatggtttagaaatgacataataatacagacatttgtgggtggtaggattatgcatatttttatatatttttaaatatatttttcaaaagcttcctataaagaatgtaattctttcccaattccaaatctagcttaaacataattttacaaaaattattctctcagaatgtaaactagtaccacctctatggaaaacattatggagatttcctaaagagttaaaagtagatctaccatttgatccagcaatcttaatactgggtatctacccggaggaaaagaagtcattgtatgaaaaagacacttgtacacatatgtttacaggaccacaattcacaaatgcaaagatgcagaaccaacctaagtggccactgactaatgagaggataaagaagatgtggcatatatatatcagggactactactcagccattacaaggaacaaaataatgtcttttgcaacaacttggatagagctggaggccattattctaagtaaagtaattcaggaattggaaaaccaaaaaccgtatgttctctcttataagtgggaactaagttaggaataagcaaaggcacacagagggacatattggactttagagactcacgaggaggagggtaataggggactagggattaaaagaaaaactagacattaggtacaaggtaccctacttaagtgcactaaaatctcagaattcaccactacgtaattcaactaagtaacaagaaaccacttgtaccccaaaagctactgaaataaaaattattctctcaaaaattttaagccctaaacttcagttcctattgtttatatttactaagaaaaacaacagaaaacactgttttaaaaatggtggatttttttaaggttaaaggtatataagacagctgcctaaggaaacgcagatacccctgtaccttgttgttgttgttgtttttcacttttttaaaaaacatagagatgggatctccttatgctgcccaggcttgtctcaaactcctgagctcaagcaatcctctgacctcagactctcaaagttttgggactacaggcgacagtcaccatgccagccaatatccttgtacttttaactcattcctacaagccatgaatcctctaagcattgtcccagacacagcactggcaaacttcaatcgttttcatcagaatataaagaaacacagggcatgcttaacttcaaggttgatatttcctttgtgagtaaagccttgccacagatgagaagtcctgaggatcaaacaggaaaactttaagtttaattaaatctaaaatcataaaacctaagttatatgactaagcaaactcttcaaagcactcagtcaacatccatgctggtaaatatttcaggaatgaaatgaaaaataactttcaattctaaaagttcatccatcatgcatgcttcacgttgtaaagcaaatatttcacaaaaatgagtttacaacaaaagaacaccaatcccacttctccaaccctccatgtcaggcagtaagctttccacatttgcttacattctgaaaataactattttacatgccaggaatgcaataggcttaagctgtcaaaaagtatcatactttaagtgtaactgggtaagaactatgggcacacacacaataagccttccaaaacaaggggaggtaaatgaaatcttaatacctgtgtttccagaagcccagaaatgaagtgcaattccttataatctgtacatgtttacatacccatacagacaataaaatgtgtaaggtaatgacaggtccatctctccccttccttttagtgggcatctgacatttcagggttcagaatcacatatcctgggtcccaaaaggtccccccattcctattccaacagtgctcacaatagaaaaagatgaactgatcactggaccctacatcatctcatatatgtataatactagtccacagagaggttgaagatatgcctggtaactctattcatcctaccccacaagttttgtccaaatcaggccatgccttcaagtgggccagattgtcttaaagctcctggcttaatatttaactgatagcaacaacctaacgttagtaccttagtaactaaaggggatgcagcaacatgaagcagaaaaagtgatgaagaaagagattagaagttagagaacagggactgggctcttgatccttaaaatgtgggtgattttgaacaactcaacatctccagatattactttcttcatctgtaaagtggagaagcttaaaaaggaggtcttatagattctacctgttccagaaactatgattctcttcctagacagctgcaggttgaagagactctcctagagctgcactgtccaatacagtaaccactagccatctgtggctactaagtacttgacatgcagctggtctgaattaaaatatgtgaaatatgtaatcaggtgcggtggctcacaactgtaatcccggcactttgggaggccaaagcggcaagtcacttgaggtcaggagttcaagaccagcctggccaacatggtgaaatctcatccctaccaaaaataaaaaaattagctgggtgtgatggcacacgcctgtaatcccagctactcaggaggctgaggcaggaaaactgcttgaacccaggaggtggaggttgcaatgagccaagattgcaatgagcaagctagattgcactctagcctgggcaaccgactgagtgagactccgtctcaaaaaaatagtaataataaaataaaaaataaatatgtgaaatgtgaacattttgaagacataatatgaaaaaataatgtatttcataaatagcttttatattgaccccctgttgaaataacattttgaatttagtgacagactaaaattaatttcgcctgcttatttttttatgtggctacttgaaaactttaaattagatctaacggtcctattatacctctactggataattctgctttaaagtcagtcctgggcatgcatgacgcccagaggaattcacagataaaatgagcccaggaatctgtatggaatacagacctgtaggttaccatttccatattaaatgtgtaaagggctgttttaaaaccatgcttttgttttcttattttgtgcaccaacaataaatcaacagcaaatatcattgggtctaaaaataattgatatctggctgggcgcggtggctcatgcctgtaatcccagcactttgggaggccgagacgggtggatcatgaggtcaggagatcaagaccatcctggctaacatggtgaaaccctgtctctaccaaaaatacaaaaaaacgtagctgggagtggtggcggaagcctgtagtcccagctactcgggaggctgagggaggagaatggcgtgaacccaggagggaggcagagcttgcagtgagccgagaccgtgccactgcactccagcctggacaacagagcgagacttcgtctcaaaaaaaaaaaaaaaaaaaaagataccacttcatttatgctatgcctgaatcctaattatcaactgtaggccttaacaataatcctaagtggatgtgcctttatgcaggcacttgtggcctttttgttttctttgaattaaatatacaaagtaataatttatcttacttcataaaaagattataatctcccattttttaaaacacatttgatattagtaggaataactaaaatgaactcgtatgaatagaccatttttatttcattgatatctaactaggaacgttgcaactaatttttgcaatctgtatcaatttgtttaatatattttaaatgaacaaagaagcagagatagtttctagagagcttatttacttaaaaatacaacagatattaatcaataaaatattaataagattcaggtgagtcgagagtgagtactcaagttctcttttctcacaacgtattcttggagtgccaaccttttcagttcaatgattttatgcaaaggtatacatctaactgcctgcaaaataaactactgactattttaaatcagataaagcaaacaacagcccccagctctgcaatccaaagccagcaaaggtcacccatttcagactgggtttgaagcatagccagttatgatagctcaaatattttcagatgtatgaaagcagaacagaattcagaaatatacattctttggcagacaatttttttagaaccaagtttctcaaattatataatacaaactatatgactattagaaaattatgcatgaattaaaggagatttatttaattttcaaattctaatataattaaaattttcaaacttaactatatgggcttcacgggtgaaaaaaagtataatttaaaaatatgagcaatataatatgacagaaatatacattcaaacactctttctaatttttcataaattaacaactatttgagacatgcacaaattttcatgtgtttttctgaaggtggtatccagaagtgataattttcctgacagtttaacattttttaaagacatgccaagatttaaataatgtagctttttgattactctttttttttgagacagagtctggctctgttgcccaggctggaatgcagtggtatgatctcggctcactgcaacctccgcctcctgggttcaagggattctcctgtctcagcctcccgagtaactgagactacaggcatgcaccaccacgctcggctgatttttgtattttttgtagagacggggtttcaccatgttggccaggctggccttgaactcctgacctcaagtgatccacccacctcagtctcccgaagtgctgggattacaggtgtgagccaccgtgcccggcctttttgattactcttaaaactgcgggatcaaaatgaaatgttagaaagtaaaaccaacagcagaaagtaaaaccaagagcagcttctgaggaatcatattttagacatttctttcagacagattctgtaatgtgtcaaactattggaacatatttcaactaaatatttaagtgaagacaaaatccctactacaaaacctccaaatactctaacaatgatgattctatcaggcctactcagaactacaggttttccccacatcttgatttcaaagcatactttctgtgacgtatcttcatttaatcacttttagaataattgaacaagaaaataggtaaggaattaaaataaattttaaaatggcagtcccattcttactgacataaatttattaagatcaatgttcctttttgcatagatcttcccattctgtttcaataacaccagcaagcataaacagatttgaaaagctacgcagccacagaaaacaggttcagcatgacagacagatctagctcaaaagaggtgctcagtgtcaagctcttttctaaaaacctcaaagcttgttttgtctgctgttgctttcaaagaacaagcacaacaaaattgttttgaggaagtctctagatcaaacgaaagacagttaaccaacagggagagtaaactgactgccactgctgtccacacagggccacagaaatcattgctttgttccatcactctagctggaaggccttcccaggaatgcaagtctgaaccatctagagttctctcagccagaatgaaggctcagctcttggatgtttctaccataaaaatgagaaagcatttcctacctcctcctctgtcactccacaaagatgtgcttcctgtgtggctggctagcagataagagaaggtaagcaaatcccaaaagcctactctaatcgctcacggagaatcttagctttggttcagaacgttaagtctacccattttcctctatccctttatggtactgtatttcttctacatcccagaatgccagttgccactcaatatcctacctctcctttacccttaagaagagagccggaaatgtaatttctgatagcaatgctcccagctaatagagcacatttacatgctcccttgcatcgaggtgtcactatctggcccatgagattaagcagaccttgaaaaggacttctacaaaagctcctaaacctaactgaaccatgaatatcaatgcctcgtccccattttaggaacatttaaaagtactccatttctaagaaaatgaagttcaaactcattaagggcatccaaaatttataatttcacactgtctccttcacttattatacccctgggcttccccctttgaaactctacaccctcgctgttttttctgtctgggaagccctccccaccccagttcaccttcacacatccttgaaacctagttcaaattctgcctgccttctctgggaagagtttgtacctcctctattatagcctttggcacactgtacctaattatttctccgtctctttcttcctccactggactgcggaattcctcaaggcacagactgagttacctttctatttactcacagccccacccagattctagatctcctgtcataactgaaacacagaatccatgcagtatgtccataaaatgaataataatttcacaaattcaaaatgagagaaacaataagatagtaaattttttttttttttgagacggagtctcgctctgttgcctaggctggagtgcagtggcacgatggctcactgcaagctctgcctcccaggttcacaccattctcctgcctcagcctcccgagtagctgggactacaggtgcctgtcaccacgcccggttaatttgttgtatttttagtggagacagggtttcaccatgttagccaggatggactggatctcctgacctcgtgatccacccgccttggcctcccaaagtgctgggattacaggtgtaagccaccgcaccaggccataaattagtaattttttaaacatctaactccaaataaatgtcaacatcacagaagtcaatcacaaatgccctgagaaaacttgcagtagagacataaaaggggaatgcacaatccaaatattcagctaaacattctgcattaaaccttccccctcatctgcacacagaagaatcacgggcttaggcttggctttgtgttcaacctctgatagaaatgagcaaacgagcaatgaagtcaacatgtcagattgctttgtaaatctaaataacttcgcatgtgataataaattctaagaatgcatccaatgtctttttctctgcaacaacaagacactaatatttttttctcatctcatcggctatttattaaatcaataaatacaattaaaaacacatgcgcataagaaatactctcaataaactgaagggatgcttcccatctgtgtccctacaatatgacccagaaaattcacaatgatataaatttaacctttgagtctagctcacaaaagtgaagtgaaatatccaaatagcaaatacgaagaaaggaactaccaagaaacaaggaaagtcagcctccaattttgttcatttaagtataccctctctgccaccacaacattcattatgtttgtcctggacagctctaatggccatgctgattgatactcagtgttaaggccacctctgtccaacagacagaggtggcttctactctgtttcagccaaatactcacatggctactctatcatcacctggaaatctcccagcttccctcaggaattcccccctctcctatttcactgaacaagcaggaataagtgattccaaaattgcaattttgtctcaaatgtactcttaaaagtgaaaccctccacaattcaactagcagcagttctgtaagctgcctttacattcaaacaccctatgggttagccaagaacgcccctccacaacaaccatagaatttttatattcgttttacttctgttgcatttaaattttctggattctgtggtataagaggatttaacacttgacacaaaacattcaaaataagattgagaaaatactagcaagatacaaggctaatcataatgacctcaattagattttcaattcctgtcaagttaatggtatatagtagtattggcttcaagctcttcaaattgaaaaatacaattcttttagataacagaggtaatagaattcaatatatttttttaaagggccaattttgatccttgtcacactaaacactagctgtaaaatggccaaaaaaggagccaaaaaaaaagacaatgacagagaaattttcattttcatgccactaaatttaattccaatacacattttctttccaaactctactaacttcttcacacaaaattatgtctaggcaccctctattgaaagtgtcccaatcaatcagggcatggatgaaatatttcaaaaatgaggcattttttctttttgcaggccaactgaatttttgaaatacaattgcaaatgactgaacgtgatgtattgacagtatttatgaaaccttttcacaataaaatgttccaaaaagaggctgaaaaaaaagaatcttatttaaaaggctttaatcttctttctatgcttgttcgcagtttcttaaatgttgagaaggttgcacagctgttcgaatcttcaatctgaacgtaattctttatcaccacaacatagaatttctagagaactcatttatttagtacatacaaaatgtaaggcattatcatgagtgatcaaacaaattactgtatagaaaagtgtgtgatcacaatcaacactaacttctctctcccaccacttgttttcaacatttaatcacccaaagtagatcttctgtctacaattattcttttacaatgtagtaaatatatagttccttcccccagttatctaagtttaccttcacatactgaaatgatcagagaactttgacaatactacagaaactattgcattcacaacacacatccttctacgtagcattctcttatattccttacccaacttaattttttccaagtcacttccttcctcctttttattctgtctaccctcttgggggcaaggacctcgaaaatatttgtgaaatgaaggagtggccctttcttggttgtacccctaagaatctaggtttctttgtgtatgaaaataagctaatttccacagaaatttggctttaattttaaattgctaatcaatttaatatgtaagtatctatgattaattattcttagaataattagtctgcatattttcacatttctatgggagtttcttaggtactcttcagttatatcctcaaactaatttactgtaatgacaaaattatatttgtgttaaaccataataagcaattgagagcatcaggatggagaatatttgctactacatatcacttttcatatgatgggttttaatgttagtctctgaagacttaagctaagacttcaaaaactttgcatcggttttaaaggcttaatctttgaagtagatgaggattttttttttgaaagataaaaaaatcaataaatacagttaagaaacagtgcttatccatctttattctatgagcctatcaattcaattataaacaaaataactgagtaatgatatttataaaaacaacattggccaggcacaatagctcacacctgtaatctagcactttggaaggtcgaggcaggaggatcgcttgagcccaggagttcaagatcagcctgggcaacatagtggggaccccatctctacaaaacatttaagaaattagtcagatgtggtggcacatgcctgtagtcccagctactctggaggctggggcaggaagatggcttcagcccaggaggccacggctacagatcacaccactgcacttcagcctgggtgacagagtgaggacttgtcccgaaaacaaacaaaaccaaacacagtatcaatatgcttttgaaaattcatccaatagtaggagtagatataacaagtccttttttaagatgaataaacctttaatggataaagccattttctttactttctcttaaaaataaaatttatgttgcctcactaattttactgtgaaataacgagcacacagacaaggaaaaactaaacaaatgagtttgtagtaacttgggatgaggggcaggtctaaaacacgttaagtctatctcaacagtaggattaaacctctcatttttcttcctgtaaaatatctccagggggtcaaaatatattagttattcaatgtttgaaatttagcaaagcagcaagagtaataatgcatttcttcacttaacacaaatgacttttctttatgcaacagatctcttattctcataagtatcttttatggctgaaaagtaatttatcagtctgtatcatctaggatgccttacatttttcaatgaagacagtatgtggctttctggaagctaatgaaagccaaattattaaataagagacaaattattagattctctcaaaaaaagcatcaggcaaaaaaaaaaattcctatcaaaatcaccaaaaaattggccaggtgcagtggctcacacctgttatcccagcactttgggaggcctaggtgggtggatcacttgaagtcaggagttcgagaccaccctggccaatgtagtgaaaccctgtctctactaaaaaaaaaaaaaacaaaaacaaaaattagccaggcgtggtggcacatgcctgtaaacccagctattcaggaggctgaggcatgagaattgcttgaacccgggaggcagaggttgcagtaagccaagacacgccactgcactccagcctgggtgacacagtaaaactcagtctcaaaaaaaaaaaaaaaaaaaaaaaaaaaaatcaccaaaaaacaaaagaagtgacaattattcttgttgaatcaaatttctcataagaaaaccttctgactttgtgaagaaaaaaaggaaccatctggaaattaagagattcaaacactgtttggggtccatcattaataagaccttaaggaatcactgcacttcattcatcaggatccattaatttacaaaacaggcttattcatcttttcccttttccaaaatgtttgtcctatttattcctcatccctgctcatgaaccctccactcctgcttctggaaccatcttaatcactcctcactgtatctactgtaatcaggatgtttatcacaaatatggcttctgtcattacacatcctcgtatgtgaacccacttcttgtcttcttgtctttagttggacaggacaattataattacatgagctggttaacaaaaacccatgtgaattctttgggactctgcttcttgatttttccctgcgttcatcatcatttaaccacagtatcaccagtttcatacactcaaggctttcaaatatccttggcctgcttttgaagctaaaaaccttttatttttgagcaacatatgctgatttttaaaaaaaatatataatttcaattaaacagcagatcactataaagttttaaagatgtaacagccataacatggctggttacacaaattcactttactgcagctgggcgcggtggctcacgcctgtaatcgcagcactttgggaggccgaggcaggcggatcacgaggtcaagagtttgagaccagcctgaccaacatagtgaaaccccgtctctactaaaaatataaaaattagctgggcatagtggcacacgcctgtaatcccagctactcgggaggctgaggcaggagaatcgcttgaacctgagaggcggagattgcagtgagctgagatcgcaccactgcattccagcttgggcgacagggcgagactccgtctcaaaaacaaaacaaaacaaaaaattcattttattttgaaactgatttcctagagaaatgccgcattctcaagcaatctgctttttggtttccctgtccttgggtgaacataacttcaagcttccatattaggaccaaaattcttttgctggcatttgaaatcttccatttctacccagattggcaaagcctgtttattcgttttgctagcaaagattctactgaaaactaaaccaagtctgttcacagttccttgcacatagctgatagccaactaatagttaataatcaagccagtgtataaacttgctcaatattagacatctgtggcaagctgccagtgtgtacaacattaaaaaataggtctctgggaggccgaggtgggcagatcacttgaggtcaggagtttgagaccagcctggccaacatggtgaaaccccatctctacttaaaaaatacaaaaattagctgggcatggtggcgagtgcccatagtcccagctactcaggaggctgaggcaggagaatcgcttgaacccaggaggcggaggttgcagtgagccgagatcgcgccactgcactccagcctgggtgacagagggagattctgtctcaaaaaaaaaaaaaaaaggtctacatccatgttatgtggaaaaaaagaaaaaaaaaaactaggtatttcccatttgtgtaaaaaatgcttatgctttttgcacatttctgtactgttttaaatttttcaatgagcatgaattattttcatttttcaaaaaaccaattgaaatacacaatacatatttaataaatgaaattttataacatgtattctaaaaattgtatctgagataccatgtgctttttaaatttagatcaaactcatagacaacaatctgtcaatttcctgcaatagtcttaattggccaataagtaatttgtcaataagtgaaacatcatctagatttttaactttcaactatgcaggaaacttacatatacccattgtacatcaacatcatcaccatacatagcagcaactaacacacagtgcttatgctatgccatcaggttacatatatattaactcacacactgtttcaagcatttaacaaagatattaattcgatcctcaataactagaagtactcatcccattttacaaaggaaaaaactgaggcacagaaacttgcccatggtcactagctcaaaagaaacaaagacagaatttatgcccatgcattcctgccctggtctaaactctcctgattagtgtgcaatgctgccttctctacatacctgagaaacactcaatgactcagtgttattggcctaacatcacgcctggcatcaaattcaacattataaattgagaacaactctggttcgttctacagaggtgacatttttaaaaacctctcatcttccccattttaactatcttctttcgtaagatactgtgagtctcgcaaggttcaagctaaatctctattgcatgtttcttcaacatgtagccacacaaaataaacctaaataaaatgatctcttaggtttctatttcagcagatttaatacatgtgaacctgagacttctgtggccctctctgaatactcagctagctaatctactaagcatccctgtttcataaagctattaattgatgcacatatccaggcttttaaatttaaatatgtgaatttattcctagagcaatcattgtactccagtttttgccagatttctacttctgaagaggtaccactcaagcataataataatctataaccaagattaatctaaagaggaaaatttgccaaacttttttttccaagaaaaatactagtgtcctcacagtaatgattatttcttaagccatccacactaaactgaaaaaatagttacataacatttccccctttactaagcttttcacttgcaaaatcagcttcagggtttgagttctgtctgcttttcttcttatacaacaataaaaaaagaaatacatattttattgattaaacttgctactcattctggggtgtgctcattccttcccctgccaccttctgtcttctgtgtacagatgagggtgttatctgtacactggctgtgagacccacagggtgacagcgtttccaagggtttgcaaaagacggcatttcccatccatccccactccatacatttgcatctgagctctcactatgaaaaggaaaagatttttttatttctgttttcttcagcccttttctgtctacaaagccaatctcctctgttcaactcatcggaacatttatactattttacagaatagtgttgcctgaatgtagaatcacaacaaagccagttgagatctttaaattaaaaaaagaaaaaaaaaagatttcataatcaagcatagtcaagtgaaacagagagaggttgaaaaccaccagacaaaaacaaaacacaaacagaaaatgtgatttttccctatcctcctcgttgccactgttcatctcatactctgcccatcaagatgctactgaagctctctggtcctgcattcagccccttacctttgacctctcaactccttatttcaaattccctactcctgttgagaataccctgcaccagcatctgtcactcaagtgagagagagagagagagagagagagagagagagaaagagagagaaagagacagagggtgtgtgtgtgtgtgtgtgtgtgtgtctgtctgtctgtctggtagaggcagagaggaatgtaaacaaatattgtatatgcagaaacttaacctccaatccccagacctgggatataaacctggctggaaatttactaccaggaaatgctccaggattatctatgatctcatcccattgttccttactttttaaatacaggaagttttctctgtaacatatttactcagtatacctaatctgtattttccttttggtattttagtacattccactttgttttattatcatgtgcatgttttatttaccctgcaaacttcctgggagtaaggggagggaggagggaaggggaggtaatgaggtatgcagtcgaactaaaccttacattctggaagctttaaatttaaaatgcatctgtacaggtttatctttacatttgtaattgatagagattttaaaagaaatgtattaatgaaagatgctttgtaagattctcaaggtaatacaatttgcagaaacaatgtacatttctactgaatttaatgcacttctcactgatagtttagtggccacgtgaaatgcaagtaatagctatgcttatttccagaatgactgacaacattcatacaaatatctgtagaagactctagtatgcaaaaaacagtaacataaaatagagatcctctagcaacaagacttaacataaagacaacctctcccattccttcaaaccaatattgttgatcacgttatttctttttaatttttttgaatcagccattcctcatttaacctcgtgaacttgcatgttccttttcatttcctcagtcaggaccagtattattccatctagtaacttctccgcagtactaatagccttgcaaatgtcgttcaggagcctctgctggttccggtgacaagagaaaagcttctgcagtctgccagttatcatggtttctcatcgattagcaagaaccgtgactccttacagatcaccatcaaacctgagctttactattctgtgtgtcggcttctacctttagcgaggtactagtcagtagcagcaggtttccataaactataaattagcactaccacaaaggtaagatgattgtgactaggttaaaccctcaacagagggaaataaaacttaagaggaagctagatttaaaaataaataaataaataaatattagggtagtgaaacatcatatagattagggtttgttaaactcacacctctatcaacataccagccaaaatcatcaacccagataataaccatgtttcccccgatagccaaggccccattatcattgcccttattcatttcttttctacagccacctgcagcagacctattttctaagctctataaaagacagtcaactcgtaattacatcttttcagtggacacagagagaaccagataaaccaccctcaaacctcagtagactgaattacctacccttctaccaacacttcgcaaaatggcataatgtgaatctcacctccaccctttaaaggagttaacaatagctactgaaaaggtcccaaaagatggcagaaagagcatattaatgcaattaaacagaccaaaaactaaattcgaatctgcctacatgcttcctctttttatacagaaagaaatattgctcaacaaagttacatatttaagttttgacaaaagcttcaaaaatacggttatcatatgcttttaattccttaaatgtatggtttttaatctgtagtaagaccattcgggaaaactggaataattctacaaataaatgtaagtaagtcatgagagaaatcagaattctcttagttaagtgcatttttttaaaacatggaaaacgaaattctttaactcttaaaacaacctgtcttaactagccctaaggtgattcctgagccacttgtgggtaaaaatcagaagagaaaaaagttcaatgaccttgcaaattagaaactaaaaaactaatggtgtgatagtctgtacagcctcagtggaattacaggaaaacatctgcccggaaattgctttttttcttttggaaaattactaggaggctgggggaaaagaggggaaaaacgggtaaggaaggttgcaaatgttaagatgccaaacaggaacccaaccgaagtccgaagtgaaatacagcctcctctggcccaactgtcatgcaaacaacttctaagcatcttcagatgtaaagaaaaacagtcattgtgcacaggcgttagctgaatgttcgagagttggatgaatggggaagacttgttatacacctagtggtgggtggatttcactaggctgcagcctccacacagcttttctttgctgcactgcagaggcgccatcttctccgtcttaatcttcactcaattcgatccttttatctgcaccctaaaaaaaagacccttcggaccctccccagcatcctgtgcccccaggggaactaaaccagagtccccagagctgccagggaagaggccgcgccttaatcagacaaacgcctccttggatgcacaggacagagcccgtgcctccccaccatccgccactgccctttccagacgcacatcccactctccgccttatttcctccccgccaaggactttacagcccagcacagaattaagcctcggaggtgatccgagggtgggaagcagaggggccccgaggctccgccagaagccccggcagcgtctctgccccctcccaggcggacgcgcagccccgggaagggagccgggcgggagcctcggtggcgcactgagactaacgcggctcggcccacggcgagggcggggtgtcgcggcttttgttcccgcggaccttctgcctctcagacagagcttagggtgcgagcgaactcccgggacgtccagacttggggaaggcgcggggtggctatgggtctccgacccctcccatttctcgcaagttacacaaaagggagacgcggacatgcacaaagtttgcctgtggaaggcggtgcgcgaccccgacgccggctcgggctagggtcgcacccaggctgccgccgccagcagccgcgaaaagaggttggagcaaggaagggggatgggggtgagagaggaaggtgaaacgaggcggagaacgcagggaaaagcgaggggctcctagcttcctgggctgtcccgactcctcctcctcctccccagggcccaagagaaaggaaagggcaacgattcaagagcgaaggactggctttagggacgctgcgttttcggttttccccacgtgctccttcccccttcccccctgtctgaatgtctctcgcctcccccgacccccgcttccaaggcagggactaagtcggggtctgggctcagggtcgccccctacccttctcgccccgggctggcgcggaaccagggagaccagcgcctcgcccgctccctctcagcgggccggagcgcgactccctggggcagggctgggccgaaagcggggatgcgctggacgtccgcaagcgggggcggagaggagaggggtcccattgacggacccccggcttctctgcattaaagacttgggttaaggtcttggggggtatcgcgtccccaccgtgcagcctccccccgccttccgaggcgcggcacccacctccagcgcccgagccgtccaggcggccagcaggagcagtgccaaaccgggcagcat

SEQ ID NO: 76 - DNA, 508411 bp, Homo sapiens
atcctaagaggcagggatcttaaggacaaggaagagaagagagagagggagggatctttgatctctttctctggtaatcttaatgcataattttactaatacatgttctcaattcattcatattattaagctcttcctgcagttgatatctgagcagagtaagatttgtatttccatttttacttttttgaaagagaatatatggacagattattagtacaatttgggcactgtggttttaagaatatctgagtaaaataacaatatgaaataataaacagaagctctaacgtcaggtaacaaatagacagcaagaaaggttttgcaccatcctcttacggcctagagagttgacaagttgcttgtagttttaaaaaaataataaagtatacccttctggtatatcatcaagagcttaagaatcttggctttcatatttaaaatgcttttggggagacatatattaaaattttagccaagatgatagacatgtctcaattatatatgtgtgtgtatgtttttaaagctaaaaacattacttttagatccctagaatgaaaatttttttctcatctatgcaattcccatatggtttttttttaaatcatattttattcattttctccctttagcaattttcattttatttctcataatttgaacagagacagttctcatacatgatcagatgctttttttttcttcttaccatcatttatgcatgacataggtaatgtgactaatttctccagttgattcaagaaactcattactttgcctcaaattatatgtaaaatatttgttttacttaggttacagttatcagaaaggtagtttttttcttctattaaaatataacattgtgaaagaaaataaaatttatgctattctttgctttgtttttataaatgaatttttcatagaatttacagtatattcaaaggaagaaagataaaattattggtcatcatttgtaccttagaagtacaagaatttaagtaaaagaaatgttcatttttgttttaaaatttgttttccatgtgaagtttttattgagccaactttcatacatatcttgctagcctaaagtctaaatatttgtgttggcatcagaaaaacaaatgaggcagaattgctatgtgtggttgatcttcagataaattgactgatcacagttatttttgtatcagtctatgttattaggaaaaattgtttagttgttttctcccctgattaatggtgatattcaagtatgatacaaaaagaattgtaccaccaaatatttttgtgaggtctgctgttttccatattcattttatgctactgcctttaagaaagaactagtgtatccttgaaatagcacaaaaatgttttaaaattcataattgcaaaacaaatctgtgactaacttaatgtcttcagatctaaagggtgtaaaaatattgatacttcaatatttcacttgctgccaggaaaaacaaaattctcaatcttttgtaaatgggaggaggacttttgcatacatttttactctttaaataacgacaacgacacttatactgtcataataacaattatgtatttctttgtggttttaattttttttgtaattttacataaaacagttattttctatttttacgcagataaatatttgtgcataaaatgtaaaaatagtaaaatgagaaaaataaaactattatacagtatgtttctgtgttgcttaaaagttttttttcctgaaaacaaaatcttaaatccccaggatattttgttggatagtaatctgacagtccacttatgatacgttgtacataggattccgatgcatttttaaacttaaaagctgtcaatttgggaagaacatatttcactgaactaaaattagtaggttcatctctttgaggaaattaatgaaattccatctacaaagccaagttgttttagaatagtaacagatgaagctgtcagaaggcaagctgatgattgctaaattgtaaacctttcataaagcctttttttttaacaaacaaaaaatcacctgttcatgttggctatcagcaggttgcttcagccagaatcagaatatagaagaatggaaagggttaggaaaaagtgattcatgcctgccttcatggtgaagcaatgatgaaagtttgattgacatgcttaaataggaagttatggttagaaataaatggctttaaaaatacacagtgtgattgtatctagttcgaagcaatcaaaaaccatcagccaggacgctagtgaggtatgtttgttctcccaggacttcagttttttgtgtgtacagcttcagagtttaatttacaagccaagtatgtgtttaaaatgctttttactgataaactgacaactttagaacactgcttttaaaaatttccgtagtgaaggaccactttcttatttccaatttgtcacagacaaacatctgtaaaataaaaactgaattagtacagggagggggaaatgggaagttactgtttaatgggcatagagtttcagttttgcaagatgaaaaacaagatggttacacaactataaacatgcttaacaataccaaaccgtattaaagatggttaagatggtaaatttcatattatgtatattttaccacagttgagttttttttttaaagaatgaattactataagaattttaaaaattcagtatttaccaaattaacaatacaatgggggaggaacacattcaactcaatagatgcagaaaaatgtacaacttgacatccattcatgattaaaactctcagcaaactagagaacttctttaacctgataaaaaggtatctgtggaaaaacctacaactaacatcacgtttgttgcccctcaccactccgcccccctccccacaagatttgggaaacgcaaagaggtacctgcttttataatttttattcagaattgtatcctagtctgtgaaataaggtaagaaaaataaaaagcatacatactgcaaaaataaaactgcagaaggcatcagacatgttaaaacgcctcaagaatcaaaagttatgagaatatagcaaggtaaggtacaaggtcaatatgcgaagttcaattttatttctgcgtgctagaaactaataaatggaaattaatatttaaaaaccaccatttacaataatattaacgtgaaatagggacaaatagagcaaaatttgtgcaagacctatcaatgaaaactatagaacttgcaaagaaatgaaagaatgtctaagtaggtggagatataacaccataattctggattggaagactcaattttgggttttcttgtttttttttgagacagtctcactcactgtgtcacccaagctggagtacagtagtgcgatctcagcccactacaacctccgcctcctgggttcaagcgattctcatgcttcagcctcccaaatagctgggattacaggcatgtcccatgacacctggctgattttttgtatttttagtagagttgggggcttcgctatgttggccaggctggtctcgaactcctgacctcaagtgatctgcctggctcggcctcctgaagtgctgggattacaggcgtgagcaccgtgcctggcctaagacccaattgtgtaaatgtaaatcttgtaaatgttagttattcctaaattgacctataaattgaattacaacaaaaattctgccagtctttttttgtagacaagctagttataaaatttatatgtaaatacaaatgacacagaatagccaaaatattttggaaaaagagaacttgcactgtgctatataaagctttgctatataaagctacagcaatcaagaggtggtatttaggtaaggataaatgtatataggtcaatgaacagaatagaatccagaaatggacccacatatatggctcattgatttttggtgccaaaatcaaaggtgccaaggtaattcaatagggaaagggtagttatttcaacaaatgttagaacaactgcatatattcatggagaaaaacccttgcctcataccacacataaaaacaatggattatagacctaaatataaaatctaaaacttattaaggaattttcataaccttggggtagataaagatttcctagatattaaagaagcaaaactaggctggatgtggtggctcatacctgtaaatacagtgctttggaaagctgaggcaggaagattacttgaggccatgagttttgagaccagcctgggcaacatagcaagaccctatctctacaaaaatataaaagttaaaataaaattagctgggcatggttgtgtacggctgtagttccagctactcagaaggctgaggagggaggattgcttgagcccaggttaaaattcgaggttcaagtgcaggttgagtttgaggttacagtgaggtatgattctgccgctacaacagcactccagtctgggggtgacagagtgagacgctgtatctaataaaaaaaaaaaaagacagtaaattggacttcatcaaaaatttttaaaacacctgttatttgaaagatactattaaaataaaaggcaaggctgggtgtagtgacacatgcctgtaatttcattgctttgggaggctgactggggaggactgcttgaacccaggagtttgagaccagcctgggcaacatcgtgagaccccctctctatgaaaaaaaaaaatttaattagccaaccttggtagcatggacctgtagttctggctactcagaagcctgaggcaggaacactgtttgagtccaggagtttgaggttataataagctatgatcataccagtgcactctagcctgggtgagagagcaagaccctgtctcaaaaaaaaaaaaaaaaaaaagaaaagaaaattaaataaaggacaaggtacagattggaagaaaatatttgcaatacacttatcttacctaggttacaaaggtaagataagtgtattgaccacactgatttataatattttgtcattaagcaatgagcatcagttgtaactgaatgattatggcaatattaatatcttacaaaggtaagatatttaatatcaaaatatatgataaattcttttaactcactaagataatcaaataatttatggtcaaaggatttgtacagacacttcataaaaaaagatatacatatggccagtaagcatatgaaaagctatttggcattattagttatcacgaaataccaagtcacaatccagtaccactaaaaacacattacaactgctaaaagttaaaagactcacaataccaactgttctcaatgacatggaccaaatgaagtcacacacattgctagtggaaatgtaaaatggcacactactttggaaaagttaaacacttttgtcacgacacagcaattctaatcctaggcatttattttatgtatttatttttttgagacagagcttcactcttgtcacccaggctagagtgcaatggtgcgatctcggctcactgcaacctccacctcccaggttcaagtgattctcctgcctcagcctcccaagtacctgggattacaggcaccagccatcaagtccgggtaatttttgtatttttagtggagacagagttttgccacgttggccgggctagtctcgaactcccgacctcaggtgatctgcccgcctaggcctcccaaagtgctggcattacaggtatgagccaccgtggctggcccaatcctagacatttatttaagagaaataaaatatgttcactgaaagacttgtacacgaatgtttataacagctttattcataatgtctccaaactgttaacacaaatatccatcagcaggtgactgaataaacaaattatgaatacccatagaacagaagtacgactcagcaataaaagggagtgaacaactgcctcatcaacaactctggaaaaggcaaatctcattgtaaggatagaaagcagatcactggttgcctagggctagggataatggttgatttcctggattaggcataaagaaatttgggaggatgatgagcatagcctatattatgctttgttgacgattacatggatgaacagatttgtcaaaactcatctaaatgtatacttaaaataggtgcatggggttatgtaaatttcacctcaataagcttaaaaactgaattactagagaaatgaaatttaaaagacaaaaatacataaccactttttaaaaattattagattccacaagcataagattgctatatcaaattatcaaaattgttttaatgcttgctcttatctccctgtggactgatgacaaacagttcacggactgaccacactgatctacaacatttcatcaactgatgagcatcagttttaactgaacgattatggcaatgttaatggtatttgaaaatttctctgtaaaccttttttttttttttttttgagactgagagtctcactctgttacccaggctggagcgcagtggcttgatcttggctcactgcaacctccacttcctgagtttaagcgattctcctgcctcagcctccccagtacctgagattataggcctgcatcaccacgcccagctaatttttgtagttttagtagagacagggtttcaccatgttggccaggctggtcttgaactcctgagctcaagtgatctgcctgcctgagcctcccaaagtgctgggattacaggcatgagccaccatgcccggctgtaatgtgagaaaagcattttctcatgtctgctaacaagatagttgatttgggaatcttatttccatgatactagtaacacccagttagcacctatgctatttttataggtaacaccacagtaactagacatgaatgaaatagaacactgaagaaaaagttatttatcatatctatgagcaactctttaattcacttccttagaaaactatgcaaaaaggtttgctctaatactcacagtacgaatagagaaagtaagcttcctatctctaatgttggttttactttgtgaatgagagggcatattgcatattaatacactgataaacatcactgaatagttgaactagaatgttcatttgacttaatggttaaaggaaaaagctatgcattaagaactccatactaggattcttgtctccagctctcaaatcataaaaatagaggatttttgtttgtttttgagacagagtcactctgttgcccaggctgcagtgcagtggcacgatctcggctcactgcaaccttcaccttccaggttcaagcaattctcctgcctcagtcttccatgtagctgggattacaggtgtgagctaccacatctggctaatttttgtattttatagagatgaggtttcaccatgttggccaggctggtctcgaactcctgacctcaagtgatctggccaacttggcctcccaaagtgctggcgagaggtaacagcctgctagcagccctcgcagccctcactcgctctcggagcctcctcggccttggcgcccactctcgccgcgcttgaggagcccttcagcccgccgctgcactgtgggagtccctttctgggctggccaaggccggagccggctccctcagcttgcggggaagcgtggagggagaggcgcgggcgggaacccgggctgcccgcggcgcttgcgggccagcgcgagttccgggtgggcgtgggctccgcgggcccgcactcagagcggcctgccgccccaggcagtgaggggcttagcacctgggccagcagctgctgtgctagatttctcgtgcgggccttagctgcctccccgggggcagggctcgggacctgcagcctgccatgcctgagcctcccccctctctctctgtgggctcctgcgcggcccgagcctccctgacgagcgccgccccctgctccacggcgcccaggcccatcgaccgcacgagggctgaggagtgcttgcgcagggcgtgggactggcaggcagctccacctgcagccggtgcgggatccactgggtgaagccagctgggctcctgagtctggtggggacttggctaatctttatgtctagctaagggattgtaaatacaccaatcagcactctgtatctagctcaaggtttgtaaatgcaccaatcagcactctgtgtctagctcaggatttgtaaatataccaatccacactctgtatctagctaatgtagtagggacttggagaacttttgtgtctagctcagggttcctaaacgcaccaatcagcaccctgtcaaaatggaccaatcagctctctgtaaaacagaccaatcagctctctgtaaaatggaccaattagcaggatgtgggtggggccagataagagaataaaagcaggctgcccgaatgagcagtagcaactcgctgtggtccgcttctgtagtgtgaggaggtgtgttctttccgtctttgcaataagtgttgctgttgctcactctgggtccagctgcgtttatgagctgtaacactcaccgctaaggtccgcagattcactcttgaagccagtgagaccacaaacccaccaggaggaacgaacaactccagctgcgccaccttaagagctgtaacactcactgaaggtttgcagcttcactcctgagccagcgtagaccatgaacacaccggaaggaagaaactcggaacacatccgaacatcagaaggaacaaactccggacacgccgcctttaagaactgtaacaccgccagggtccacggcttcatgcttgaagttggtaagaccaagaacccaccaattccggacacgttttggcgaccacgaagggacttttgcctgtcgctgagcggtgagaccatcgcctatcgccaagcagtgagtaccattggaccccttttgcttgctattctgtcctatttttccttagaattcgggggctaaatactgggcacctgtcagccagttaaaagtgaccggcaagtgatctggccaccttggcctcccaaagtgctgggattacaggcgtgagcaaccgcgccgggcgtaaaagtagaggatattttaaatagaattaagtgtgagaatctgccctgttggcataaaatatattagctaattgattaaacaaagaatacctagaataaaggtataaacaaataaccttccattgtggaggatatgtaaagtggcgtgccaaaggaaagaactagaagaaacagattatggtccttttcccactaaccagatacgaaacttacagctagttgtttcacctttgttcacctccattttctctctcctgtgttggggtcgttgacacatttgcctgcagtgcagggccattggaagggttaaatgaactcagtatgtaattcatcttgcaggctcctaaataagtgtaaaggtctaggaaagaaaagcctccctccaaagaatccagtgttctaggttgaaattggtgctcctctcgcgtaatggtgaaaatcacaaagtagcgtaaaaaacatgttgaatgaatgagtaaggaataagagctaattctgatctcttacgatatgtcaagtcgtttatgtgccttctcacttatttctcacaactccttgaagtagataactgtccgttttataaatggagagattgaggcatagagggattagtcaacttggctgaagtcacttgcataagggccaacccaggcttgaagccctgcgtgggcttttcattaggatcaagtctgtctcaacagaatatagctgttaatacctacagtcaatgaaagggaggtgtgtttaacacgtctaaaaaatgagaattgcaaacattgagtatttttttcatttttcctggcttgtacttgtcttacccaaagtgagaagcttataccaaattttactttaagtagtattcatctctaataagtcaacggagttttattaaacattatcatacagccaacccttagtaaaataatggctctaggcaatcatcaccaacagctgctaaaaccactagctgaaaagttagacgctttgtaaaggatggatttgcctcacaatccctgaatacatatatcaatcttagtatcaccaaaagcgagacaaccagggccgggcgcagtggctctgtaattccagcacttgggaggccgaggcgggcggatcacaaggtcaggagatcgagaccatactggctaacacggtgaaaccctgtctctattttaaaaacacaaaaaattacccgggagtggtggcgggcgcctgtagtcccagctactggggaggctgaggcaggagaatggcgtgaacccgggaggcggagcttgcagtgagccaagacagagctactgccctccagcctgggcgacagagtgagactccatctcaaaaaaaaaaaaaaaaaaaaaaaggccaaccagataatcatatgcctcctaatatgacgcattgggacaactcttgccaaaacataaactgaacctaaatctgataaattcctcagatgtaagtaccagttcataggaaatataggacacagagagactgtcatttacatggatagaatcaacaaaaatataaaagaaaataacgttaaaaaaaattacaagaaaaaaagggaaatgtgtagattaaaagagacttaagagtgtcactcaaccaaatgcattctgtggttttgtttgtatcctgattacaataaactataaaagaaattgaggcaatcaaggaaatttgaacgctgtatttttttaaatattaaggaatggctgttctttttttcggtgtgataatagtgttgtggttataaggaggaaaggaaggaaagagaagagagagaaatggaggaaagggattttaatctttcaaaaatgcatactgaagtacttagagatgaaatagtgtgatgtctagcatttgcttcagaatatttcagtgggtggactatagattaaaacacacacacacaaaggccatgtgctgaaagcagactgggtggtagctacatgtagatacatgagggtttattatactgtgctctctgttcagagtatgcgtgaaattttccataaaatagtgcatttttaaaaaactattataaagaagcttacctaaaagaatagcacagatgcggcaatgtcacctacaaaatcatagcaggtttttaaaactgcatcactaggtaaagaatacatatttgttttcatgaaatgggcactttatgtaacaaatgtgtttctgaaaaagttgtacctaaataaaatattataagcataattgttagcagtattatatatactgtttggccccccccaaaaaagatgcatttataattttttttgcgatcctcccacctcagcctttcgctgggaccacaggagtatgctacaactcttggctaattctttctaaatttttggtagatgcaggttctccctgtgttgcccagcctggtctcacactcctgggctcaagggatcctcccaccttggcctcccaaagtgctagtattaaggcatgagccaatgtgcctagcccatagttcttgaataccaaggaagaaaagaggtttataattaagctctaaattacagaggagtggtattcctgaaaaacgtttagtaagtggaaactgcaactgtaatgcatatatgtagaaacccaagacttgcaatcacttcacaagaaacattaggcacaaattaccacaaggtaacacagcttactgacatggaaatgagattccatcaaacctatttctaaaactccttcatagtttcttattgccgtctggaaaaaaagtgcaatttccttagcgtggtgtgaaagcatggagccagtttttatctttacccagcttccagtttccatgctccttcttcctggaagcattatttatcaaccataattagcccaggtcagatttgtgcattagaaatacggtcacttagcgctgtctcctccactggattagcagccatgacgttcaggacctgatattgtctttgtttatcactgcatcttcaaaccttagttgtggccgggcccagtggctcacatctgtaatcccagcactttgggacaccgaggcaggtggattgaggtcaggagtttgagaccagtctggccaacatggtaaaactctgtctctactaaaaatacaaaagttagcgaggtgtggtggcgcatgcctgtaatcccagctactcgggaggctgaggcaggaggatcgcttgaaccttggaggtggaggttgcagtgagccaagattgtgccactgctctccagtctgagagacagagtgagactccatccgcctcctcctcaaaataaaaatccttaggtgttataatggatacagcactgtagttgtgccattagtcctcaaaattcatggtgttagcatcttatatcacttattttatagacaaagaaaaattattatactagagaactgcatttttttcctacagtttcttagatataattccatggaaacttggatctgctaaaacaatcggcagcatcaatacagcattgggaaatgataaaaggaaatctgttaaaactatcagaaatcttattaatcacatatgtttatccatttgatagataaatcatgtccctttgtcgatttaaaaataatttatattaagatatctttctgacaattattgtgacttttttgagaagcatgctttggtactatagagtatctttagcacagtgattcgtatttggataacaagagtcacaaaaggaaaaatcgcctttactttaatgcttaattatttgccataatatatttgatttgtatatgactttgtagaaactactttgtgctcaagtttgttcctctaaatagaactttatatttcttaattggccagcttgtttcattgatctgtcccaagtctcattatgaaatctcaaaatctcactttgattgatttgaaaaagtggagggaatcagaccatttggttttttttcctttgtttttgacaagatttttggtgcacagtttgagaaatggcagaattaccccccagctaaaatattcggaggctcaaaattcatactaacctttcttgtttcctaagctgaaaaaagctgccacgcagggttcttatggcaggttcttgtcaaattctcacactgaagaaaatcaatgacatatttgagagcatcaagcttcagaagaatttagcaaacaggatgtcagaaacctttcagaaataaaatcattcacctgggtggatttagggctgaaattattccatgatatgtttgataaactttcatgccactgaaaacatttctccctcatatttaggcttctaaaggttttctcgactttcttatgttaaaaattaacccatctcatctctgttgagaaataaataatgccccatatctttgaaaagataaatcaatgttaagattatgttctatgtcctcacttcatctgtgaggatgtcagaatttcttttggctgtttgtcaagtcattggcaatatcagaattatctctcagaagagaaatagttgaacttgtgtcaccctgtgggatctattgggagtgaattagattgtggaaacggcatatgctctatctgaaagtcaatctcagttcactaactagtgtcctagaaatctgaaggaggtaaggatgagaaacaatgtttcctcaaatctctctatattttcactatttcctaaaagttgataactagaagatcaatttagtatctctttggggaggagcatgagtagggactgtggtgtgtgtgggtttgtttgttttttttttttttttggagatggagtttcactcttgttgctcaggctggagtacaatggccagacctcagctcaccacaacctctgcctcccaggttcaagtgattctcatgcctcagcctcccaagtagctgggattacaggcacacaccaccacattggctaatttttatatatttttttttttagtagagatggggtttctccatgttggtcaggctggtcttcaactcctgacctcaggtgatctgcccacctcagcctcccaaagtgctgggattacaggcatgagccaccgcacccgccctgttttttcatttctgttccctctgattgaaatgcttcctctttttatccttccttttccttctttctctctgtcaaaattcccattatcctttattgtccagaattgaccagactgtccttgaacacacttcctttgaagctacactcacctgattttccacctcactgacccctacttttgggttccatactagactcctttttctcttccaaccgcacattaggtgactgtaacgttacaaatcatctatgtgagtcatcaatcttcatatccagctttgatctctcccagaatccattaatatctctatctgcttacaaggatgtatagtaagacattttaatcaaaaaatggcaaaaagaaaactcttttattttttttagaccgagtcttcctctgtcacccaggctggagtgcagtggtgccatctcggctcattgcaacctccacatcctaggttcaagccgttctcatgcctcaacctcctgagtagctgggactataggcacagcaccaccacgatcactaatttttgtatttttagtagagggggtttcaccatgttcaccacgctgatctccaactcttgatctcaggtaatctaccacctcagcttcccaaagggttgggattacaggcatgagccaccgcaccctgccctatcagtaaatattatattataaacacctatcacaaatgcataggtactcagatggatttctggagatgattctttaaatgtgtttaattatgttgattgatttttgaatcacaaactgattttgttttcctgtaatgaacccggcttggctctgatgtattattttggcatgttgctggattcggtgtacaagtattttgttgaaggttggttttttgtctgcaaacataagagatactggtctgtaattttcttttcttgttgtcaggctttcctgtgggtttttgctgtccccataactaagttggaagtgtttcttttgtctcttatttctgaacatttttggataatattgttattttttctttaaatattggatagacttcaccagtgaaaccatctagccctggagttttctttgtgaggagacttttttattagtggattacacttcttaagtagatataggaaaattaagagtttcaatttcatcttaagtcagcttggacaagttgactctttttccaagaaatttgtccacttcatccaacttgtcatatttgttggcataaaattgctattatccattgtctatagaatctgtggtatatcttgctttcattcttgacatcgaaatttgggtttgtctcttttaaaaaaaaaaaaaggtcttgctagggatgaatcaatttcattgatctttttaaggaattaatttttggctttgttaattttctgttatttgttgtcttctctacagatttatgcttttatctttattgctttctttcttgtttgggtttaatgtaatcatatctttctggcttaacgtgaaaacttatgtcactggtttaacacatttacttattttttgagaatccacagaccatttattaagataaatcttatttgagtccatagacaagtcttgataaatttaaaaggattaaaaccacacaaagtatgttctctgactataagggatttaattagaaatcaatagcagaaagatacgtagagaatacccaatgatttggaaattaaacaatacattaaaaagaatttttttactatatacatttaaagctgtgcatttctcctaaacatagcttcagctccatcaaatacattttagaatgtcgtacttttattataattcagtttaaatatatactaagttcctttgtcatttcctattttgcacacttggattatttcaaaatatattatttaatttcaatatctatcacagtggcttttgtcattgtgagaagttacgaagattccaaatttcttatgagtgggtattgtttgctcataaaagtttagcccattaaaaatgatgtggcatatgaaataacataacattttatttccttttttattacttctttgtaaaatccaattttaaacattttattaaaagcaaaaagttatgatatagtattaaaatatttcattttgggctgggtgcagtggctcttgtttgtaatcccagcactttgggacaccgaggcaggtggattgaggtcaggagtttgagaccagcctggccaacatagtgaaaccccatctctactaaaaatacaaaaaattagctgggcatggtggcaggcgcctgtaatcccagctacttgggaggctgaggcaggagaatcgtttgaacctgggaggcggaggatgcaatgagccgagatcacaccattacactccagcctgggcaacaagagagagaagctgtctaaaaataaatttcggtttgaagaatacatacatcagtatctatatatgtaaatcacatgtatttatgtatatgtgatctttacaccacaggtaacttaaaaaatgtgaatgctgttccctaacagacctttttactctcttcagaaacttcataacatggatatttgaaggaaatcctagagctgaatttaaagacggggtttgaggagacttgagtcattctgtatagtaaaataagattttgttgttttgtcattgtttacccataaaatgagggaggagagctaagcactatgcctatgaagcctgcattgcagaatctttcagcaagattaatgtcaaatgtggaattttaagatgttgacattactatatgtcaaagagtgttataacaaagtatcattaaccagtggcttataaacaacagacatttatttctcacagttctggaggcttgaaagtctgatatcaaggtgctggcagatttggtgtctggtgaggacccacttccgggttcatagatgacgccttctcaccactgggtcttcatatggttaaaggggcaagacagctctctgggaccaattttatttatttatttattttgagatggagttttgctcttgttgcccaggctggagtgcaatggcacgatctctgctcaccacaacctccgcctcccaggttgaagcgattctcctgcctcagcctcccaagtagctgggattacaggcatgtgccaccaccccggctgattttgtattttttgtagagacggggtttctccatgttggtcaggctagtcttgaactcccgaccttaggtgatccacccaccttggcctcccaaagtgctgggattacaggcgtgagccaccgcgcccggctgtctgggaccaattttgtaagagcattaaacctattcatgaaagctctgccttcatgacctaatcagctcccaaaggccccacctcctaacaccatcaccttggtgactaggtttcaacatgtgagttttagggagacgcaaacgctcagagtatagtagttatatccttccatgtccactatcgccacctgcacatgtgcctctcataaaaatgcattgaaaaggtgagtttggaggcaattaaccaaaaatctacccagttttagatttaggaaatgtaaatcttaaggaatggaaagccttcctgcagacgtctaagttgtgtttgggtgtgtatttatttgagtatatctgcatataagtgttaaagaatcggaggacaattcactaatacacattcgttatctctagaaaaaggatttttaacacatttgcttattccaatttctactataaaaatagatcactgtagtcatactcccacttatggttaagatggtataaccagaatgaggtaagtctcatttatttatcagcttaaactgagattccagggttgcagcatgcagagagagtagaaaccactgggaagccaagacagctagagttcacagagcagagagaaaaaaatcgcacagagatcaagcttgggagatctgcaaagggttcccctggggctgtccagtgagacctggtcagtagatatacacgggaggatcctacccaaggctggggaaggagccacgtgacaggagcacagggaacaatcctcagagcatacacaggagaagtaatggttgtgcttccaccagccagagaggaaaaccttataaggcatagagtactcggaatgctagagactaaaggctgccctgatcctacctgacaaagtttaaaaagaaagcctagtcccagcggggcgtggtggctcatgcctgtaatcccagcactttgggaggccaaggcaggtggatcacctgaggtcagaagttcgagaccagcctggctaacaaggtgtgaaaccccgtctctactaaaaataaaaaattaaccaggtgtggtggcatacacctgtagtcccagctactggggaggctgaggcaggtgcttgaacccaggaggcagaggttgcagtgagcaaagatcgcaccactgcactccagcctgggtgacagagcaagactcagtccccccccccccaaaaaaaaaaaaaaaacaaaccagcaaagcctagtcccagaataaaatttaaaatgacttttgggaataaaaagtaatagattattgttaatttccattactttaaaatctgatccattacatattatatgcgtgtatcaaaatatcacatatacccccaaaatatatacaactattatatgtcaattttttaaaagttgtacccagtcttcaaattccaactaaaatgctaactgattccttcatctgaatttttgtagcattcttttatggcaattaacacagtctatattttagagattttatccaattgtattgtaaatgggttttatctattaggttggtgcaaaaataatagcgatttttgcaattacttttaatggcaaaaaccacaattactttcgcactaacctaatggttgtgctgtaaattcccaggggatagggaacacccaagattcatacaactttgtgtaaatatgttaaccatcttgcattattagtgccttacataaatctgattttaaaatatatatttgcccagtaaatgaatatttcagtaaagtttaataaaaaaatataagtattaactggctattaattcatatgaatttatgtagaagtcttcttaaaaatttgagagttaacttaagaatcattctcatatcattattgccagcatgttttccaaagtatgagcctaaatatatggactagccagttctcatggccattagtgtacacttgtaaaattatttttatttatgttggaatttgcaaagtctattttcaaatccaactgggattatttttatggcagagattattacagcggtatttctaagtcatgtagaaaaaaatgtgaatctgggaggttctgtgatgcttagagatttcagttccaacttgttccagttgatgtcactatggcaaaggtatcccacacatgtggcatacagcagcgggggaaggaggatacaaatctaataatgtggccaaatcaagaggaaacgtatttgggggcaaggctaaaatgggaatgggagcatggcagaacatcaggattccacatctggaatcagaggggctgagtgaatgcatttacctgatcttctatgagtcagcaaaacaaacacacaaagccatcgtgagtttggaagctgtgaaactgctgctctttgcaatgacagatcttcctatgctctgaactgcagcaatacattgaggtagcagtaattacagactttcatatggcttctctgctctgtagaagtagtaaatgaacctcttggggctaaatttctagctttgggctcctgcaccatctttctccctacaggaagtcacgacagacaacagaggaagtccaaagcaaggacaacgctgtttatgaaaaggagtggtaatggttcagagtgaaaattaacagatgttgggataaaaatgtctgcctgggtactttatggctccaaagtaaataatatgtccctgagttttagcagctgtttagggactcctgtatcttagtgttagtttaaacggcaaggtaaaggaactcatgtaacttaacactgttcatcaacacaaacttactggatatctttctgaaatgtgaaaacagatctgttttcagatactattcaactgtgcaaggaggcaaacagatgtattcattaacactccccacagagcatattgtgatatttgcaaatggaaaatgctggagctgaggttacacaaatgttttctgttatgaaacttccttccataagaccatgattttcaaggaggatctcatttaggactgttttttgttgttatactttctgtaatgggtgatttttctaattaagataatttgcattttaaccttgttttagaaagtgattattctttttttttctgtctaaaggtagataatgttacctgtttaaattcatttttttaacccaagttttgcctcaggatctataagtcaattttttatagtaagatattggatgcccagtgaagaaaaggtttttgccaagctgaaagaaattcaaggcaagattgtgagatgtcattggtacaatacacaccaactaagaatccttgtttctgttttatgcctatgaaccaataacagtgatcagtgtggggacatttcattggaattctgcctgagaaaaagcaggagtgttcagtccttcagcgccaccaacagctctggatgccaaaggaccatgctggtagggctcagagtgctcagacagaagtatgaggcagagtttcatggggaaatgagatgggtctgagatgggtaggaagagggggaaaatgggcctctcaatgctctcatagcctcttaatgctctcaaaacagccactgaggcaatgaaatttttttttaacttttaggttcagagatacatgtgcaagcttgttatacaggtaaattatgtttcaagggggtttgatgtacagattattttgtcacctaggtaataagcatagtatctgataggtcgttttttgatcctcaccctccacccaccctccaccctcaactaagccctggtgtatgtggttcccttctttgtgtccatgtgttctcaatgcttagcttccacttataagtgagaacatgcagtatttggttttctgttcctgcctttgttcacttaggataatggtctccagctctgtccatgtttctgcaaagaacatgatctcattcttcttttatggctgcatagtattccatgctatattgtaccacattttctttatccagtctaccattgatgagcattcagattgattcctcatctttggtactgtgaatagtgctgcaatgaacatgcacatgcatgtcgtctttctggtggaataatttgtattcctttaattatatacccaataatgggattgctaaggtcgaatggtaattctaagttctctaagaaatcaccaaactgctttctgcagtggctgaactaatttacatgagcaccagcaatgtatgtatatgagcattcccttatctttgcaacctcaccagcatctgttatttttttacttttttataatagccattctgactggtgagagatggtatcccactgtggttttgatttgcattaattaaaagagatttatttatttatttatttgagacagggtctggctctgttgcccatgctggagtacagtagtgtgaacaggctcactgcagcctcaacctcccagactcaggtgatcctcctgcctcagcctcctgagtagctggggctacgggtgtgcaccaccacgtctggctaatttttaaattacttgtaaagatggggtcttcctatgatgcccaggctggtcttgaactcctgggctcacgtgatcctcccactttggcctcccaacatgctgggattacagacgtgagccaccacagccagcctgaaacgagttgaaaggcacagggagaacccaggtttctgtggactccaccaggacatgatggaaaatggaccttgaatgaaattccttgattacgtggctaggaagactcctggtatctgctgtggtaacttcaagccacagaggagagacagaaaattccctgagtccgggggataatagtcatgacaagggtgaaacagaaaacgaaaaaaaaagagaggaagggttgatacctgttgacagaataaacactacaaaggaaaatcatccttgtaaagtaaattctgtcaacatgaatcttgttcgtcaaatttgattttaatattgagagtaagatagttttcagtttgtctgctgggaccatgatgaagcactttcttcatctagaatttccctggtgatctttctggggatatttttctgtatcccaagctttcagcaaattttgatgtgttgcccactttgtgtgaagagagatacaaaagaagcttatgtgacccctgcttccccatgtgcaagacaaaactggcccctaatgaattgagatgagattcccaagatttggggacttcatggaagggtaaaattacaaaacaataacaatgttctagttttctaaggctgccataacaaagtcctatggactaggtggctttaacaacaggaatttatttcctcacaattctggaagttagcaatccaaaatcacggttggtttcttaggtcttgagggaaggacctgttacacacttctctctccttgacttttgacggatttcttttccatgtgtcttcacatcatcatctttctttttctttccctccctcccttcccctctctctccttccttcctttcctttgtttttttttttttttttgagagagtctcactttgtcacccaggctggagtgcaatggcactatcttggttcactgcaacctctgcctcctaggttcaagcgattctcccacctcagctcctgagtagctgtgattacaggcacataccaccacgcctggctaatttttgtatgttttggtagagatggggtttcaccatgttggccaggcttgtctcgaactcctgaacttaggtgatccgcctgcctcggcctcccaaagtgctggggttatatgcatgagccgccacacttggccatgtcatcttccttctgttgcttgtctgtatcggaagttcctcccgttattaaggataccagtcaaaaggtgggttattaggcccaccctaataacctcattttaattaatttacctttttaaagactctatcttcaaatacagtcacattctaagtttctggggtttggacctcaatatatgaatcaggggcttggggacagggggaacataattcagcccatagtaagctacaacaacaaacccacaagccaacaacctgaggtggatgacacatgctttcaaaatttgtattttgtaaaatcagaattaaaaaacatggctgggtgcagtggctcatgcctgtaatcccgacactgtggaaggctaaggcaggaaaactgcttgagattaggagttcaagaccagcctgggcaacacagtgagacaccccatctctacaaaaaatttaaaaattacccaggcatggtcatgtatgccttgtagtcccagccattcaggaggctgaggtgggaggaccatttgagcccaggaggtagaggctgcagtgagccatgatggtcactgcactccaggctgggtgacacagcaagaccctttctcaaaaccaaacaagcaacgaacaacaaaacaaaacctatgacattataatttaataaattaacagaaaaaggatgtactagtgatgtaatcaaagaataaaggagtattctttaaatacatttaactttttaagcatctcatatatttatccttattttttaggaccagtgaaattttgaaattttcattagtaactggtgaggatgtgctgaaatacattacggtaattgtaacatggcgccctaggtaaaatttggttctaatattttcaaaaccttaaatatgctggtagaaacctcgcaggaggtgaggcctaaatatatcctgagaccttgcttctgggaaaaccaccagaagggattatttgattatatccatattaagctgatagtttaaccaaaagagtaatttctaaggaggtagaatgttctgtgacatcatgagagaatgagagagcaagagtgacatagaggagttgaggaggtagagcagcccttttttttttttttttttttttttttttttttgagatggagtcttgctctgtcgccaagctggtgcaatctcggctcactgcaacctccaactcccttgttcaggcgattctcctgcctcagcctcccgagtagctgggattacaggcacgcaccaccaagcccagctaatttttgtatttttagtagagacggggtttcaccatgttggccaggatgatctcagtctcctgaccttgtgatccgcctgcctctgcctcccaaagtgctgggataacaggcgtaagcatcgcgcggggccgggtggcatttttataaagagtttatttccctttttaaatttaagctacactatgcctatgatctgctactctttcttatggaggtaggggtgtgtgcgtgtgggtgtgagagagtgtgtcttgttcttgttgttgcttctgttgttgttaaagaaattattcatgagtgatgcagggttgagacttagccattgatagaaaatacgtgagggcagatcttcatctcacacaaagagggaactcaagtgataaagtagaattgagcctggactataattttgatctcttgcatgtgaagctattaaaacagaatcatacatatttggagaaaggttctgatattatactaatgtattctggtgtgatttcttaccgatgccctatgacaaattccaagccctataggcaaagtttttgttgatgcaaaaggatattctcatcagttatttcagaaagaggtgcattctaaatgaggaaattaggactgacaactcagtccttagattggcttggcaaggagaaactgtatggcacctgtttctgttgtatagatctttgctggtagcacgggataccagtgtcaggagactagctcaaaggtactctgtctgggtagaggattacatactttctatcctcatgcacactgggccaaggcatccggtaaagatggctcctggacgaagagctctgaaagctgcagtatccattggcagctgaaataaaactgtgtattgcattgaaatgactttctgtcattcgagttaagtcctgaacgttgagttaagtcttactaaaggctgcaacctgtctcagttgtgctgagcaataaaagagtaggttccatgtttggtccatgtgggagggacttccgctctttagataatatattggtcctgatgttattaaattcttattttattcattataaatgttttacatgaactaaaagtattgcattaaaatatttattgcaatcactgagtttttctgtgcctctgcaaattttacaccccattatcagcactgattatttcaactataaaacgtcatgatctgttttacagtgagacaaggagttttaagtttccaagttcacaggaaatgaaacaagaaatgtaacaatatggttttatatcacattttgggaggctgaggcgggaggatcacttgaggccaggagtttgagagtagcctgggcaacatagtgagtctcctgtctctttaaaaaaataataaaacagtaaaaatttttaaaaatacaacttatcaaaatttgtgggatgcagtgaaagcagtgcttagaaggaaatttatagcattaaatatatatattagatgaaaagaaatatctaaaatcaataagctataggaaaggaaactatagaaaagaataagagtgatgcaaacagagaaaaaaataaaaattagagcagaaatcactgaaattgaaaataaaccaaagaaaatgaacgaaatcaaagctggacttcagttaataacattgtcactactggttcaataattgtgacaaatgtaccatactaatggaagatgttaataattgaagaagctggctgtgagacatgtctctgaactgtttgtattatctctgcaaatctttaaatacatagctgttacaaaaacaatgttttttaaaaaatattaaatatctggtttgagagggtgaattcattactaagcaagttggcagtatctgcttttaaaaaagctttgagaatgacactaaggacccatattttagagatggctcagatccgacatggccaagactcaggaaaggcatattttgggttccttttgaagtgtgaaatttgagtatgaaattgtctgagatcttcaagcagtcaccttccatccatttccaaatgggacaggatataaataagtttattgcttttgaaagatcatgtgtaaaagggctacaaaaacaaggacatggagaaaaggcagaaggtgcttctagaaataggattttaaaaagtgaaagttctgcgttaacaagacttgcaaaaaaactgcttaggttggcaagagctattttttgaaaaaggaattttgaaggaaagatcagaggtacttgtcccacataaggtctgctttagaaaagatgggatattaatattgctatgtcacctaattttgacttttagaacaggaacaccccaaataacaagggtggtgtaacaaaatagaaagcttgtctcattctcatattgaatttggagccaactgaccagggcttggtttcctcatctgtaagatggatgacaacagcacatcatggtgatggtcatcatcatcataactattagactgtggccgggcgcagtggcttacgcctgtgatcccatcactttgggaggccgaggagggcggatcacctgagtaggagtttgagaccagtctggctaacatggtgaaaccccgtctctactaaagatacaaaagttagccgggcatggtggcaggcgcctgtaatcccagctactcaggaggctgaggcaggggaatcgcttgaacttaggaggcagagtttgcggtgagccaagatagcagcacttcccaggctgggtgacagagcaagactctgtctcaaaaaaaaaaaaataaataaataaataaaaaataagaatcacaaacacatgtatgcacaacccaaacactgacagagaaagctctgtaaatgaacatcctaagcctcattcacacaggacagctttatagatttcttaacatccctgtttttagctatagaattgctaattgtgcaacaaatgctatagaggtgctcgcttggcataaaaaggaacagtgaaatccataagcctgaaatccatcagcatactgaaaaccaaaatgtgggaatactttgggaaggaagtatgtgtgtggtatgggagagagcactggctttgcagccaggtagatttagattggaccctgtcagagccactcactcatagcttaaacttggagactttgcaaacttcgttttctttttagttttttttggagacagggtctcactctgtcaccccaggctgaaatgcagtgacatgatcatgggttgctgcagactcaacctcccgggctaacatgatcctcccaccttagactcctgggtagcggggactatagttgggtgccaccacgctccgctaagttttgtattttttgtgtggagacagggtttcaccatgtttgccaggctggtcttaaactccactcctgggctcaagtgatccacctgccttgatctcccaaagtgctaggattacgggcacgggccacggcacctggcctgcaaatttctttcgtcctgcatttccccacctgtaaggtgaagatgttccctggagatctgtattgttaacgctcttaaaccagtgacacacccagaaactaggacagggatgctattagaataagaaaatatgagaaatatgaggataggaaaatgtttcaaagcaagttgcatgtaatgtaaactagatctctgaagacagggctgttatcttcctgcctaaaataagtggttctgtattatggaacttagctttagctggtggatactagccatgacattttgactcaatgaacaataaactcttccactgtctcacttctcaagaccccccagatgtaacctgctaaaacacctacagattattaatttttattcatatgctctctgacttggtagcaggggagaggcacttaacgttctttagacagaagatgaagaaacagacagtatgtcaacaaattgttagtgttaggagccctttaataacttcagcgaggcatccttttaggagctctaaaaataagcttcaaatttaaagtggcacctagagagctgagattacaggcgtgagccaccatgcctggccctatatttaaattcacgtgtatgcacaccatacccagaaaaccccctttgaaaaaaataacaaagttatttctaattggcaacatacagagttgtacagcttattgtttacaaaataaatcaaactcttaaactgaacgacaggaaagtgagagtttaagatgagagcggttttctgcaaattgggaccaatacctattttagtcaccattccaggtctcctgttatctgaatagtgtcttgtctgatagactaaacttacacaccattactattgttgataatgctaataaactagaaatcaatataatgaactttagcctgaaattccttaaatataagtctttgcattatgcccaaggtatttttattgtattgtcttaaaatttagattttaacatttcgttaagtttaacgtaagaaatgtattctttaagaaaaaacttccactttggatgttttttttggaagaaaaatgccagggacatcatcatacctagagagatttaaaaacagaatgaagctaaaaccaaaaatttggttttatacatttttttgagatggaggttttgcttattgcccaggctggagtgtaatggcatgatttcggctcactgcaacctctgcctcccgggttcaagtgattcttgcctcagcctcctgagtagctgggattacaggtgtgcgtcaccacacttggctaatttttttatttttagtagagacaggagtttcaccatgttggccaggctggcctcaaactcctgacctcaagtgattcgcctgccttggcctcccaaagttctgggattacaggtgtgagccaccgtgcctagcccaaaaatacgtttttattacagaaaaaaagttggtttctttggtacagatttttttcccccataacaacttgctataaaaaagtaagactcacctctcttcttccagcaacccccagggaataagattatccatccagtagagaatagaactaggaaagataaatccctctttgacttctgatattctatttttctgatgttttctgtacctccattactggtttgacataatatttggcctttgagtttttaacttttcccagttgtcattcttgagaaagtgaaaagataataagtttcaacataaatttggagtaagctccagttttcacacaaacacaaatcacaaggcacttacaatgtttcacgagctacaagtcttttaaaaataccacctattagccattgaacacagggctgttacaaacttatttatcagaggacatagttgctatgctctccatataacaacagtttcaaaaacttgcagccattaaaactacatttttttggccgggcgcggtggctcatgcctgtaatcccagcactttgggaggccaaggcaggtggatcacctgagatcaagagttcgagaccagcctggccaacatggcgaaaccccatctctactaaaagtacaaaattagcccggcgtggtggcacgtgcctgtagtcccagctattcaggaggctgaggcatgagaatcgcttgaacccaggaggcagaggttgcagtgagctgagatcacacctctgcactccagcctgggtgaccaagtgagacttcgtctcaaaaaaacaaacaaacaaaaacctttttttcctctcaaatcttttgatcctgaattaatacagaatcttattcaagtggatgctaactccattgtgtggaactttttttcttttctttttttttttttggacagagtcctgctctgtcgcccaggctggaatacaatggtggaatctctgcctactgcaacctctgcctcccgggttcaagcaattctcctgcctcagcctcccgagtagctggcattacaggcccccgccaccacgtccagctaattttggcatttttagtagggacggggttttgccatgttggccaggctggtctcgaactcctgacctcaagcgatccccctgcttcggcatcccaaagtgctgcgattacaggcgtgagctaccgagcccagcctctttgggacatttcttcttttctaaacatacagcagtggtggtgaaaatataaaatgaagatataaaaaggcatagtgatgctcaaaacccaaattagggtctgtgtagactgggaagcagcacttggacagagacagatgagtgagctgaagatccaggactgtggttgtgggtcggagttgggctctgtcgggataaatcgctccgcagaagacgggctagagtctgctcaccattgaaggaaaggccagtgcggtttttctgcccctgaaatgttattcagaactcctgctgctgacactttaccactcaggtttctgcgacagttgggtttctgtggacctgaagaagagggaggacacagactcacaagccggaacggcatgcgacgagccccccagaggcccataactgaactgcagtgtctccagccgcgccctgtgcaatgatttggttctgcattgcgccccctagaggtgagtggaagcaatgtccaagctgtgggcaagtaggattgagtacccgaagggagtgaaagcaaaaagcaaaacgcaaaaacagccaaggagcctgcaaaccaaatattgagaatgcatgaagaaatgcaatgccaagaaagaaaactgcaagatcatcatcaagtaaatgtgggtcagataaaaataataggacaatctgaaagaagactttcacataaatatttaaggtacttcaagggaaaattaagagaaatattctaaaaaaaaaaaagtaaaaggtagagaaaaaaatgtaagacaaaataggcataaataaaccaactatgggtaaacatgaaaaataactgattagaaatatgaaaaataaaaatcataaatataccttaagaaattggataaagtatattggacataattgaaggagaaaattagttgatgaaaccattcatgcagaaatagtggatagatggaaggctttccccatgtattcaaaagaaggtccagaaaagaaaatggagggaagagtagagaaattatatttaaacagtgactagctaaggctttctcagaatcaagttcaaacacaagtttttaaattaggagagggctgggtacagtggctctcacctgtaatcctagcactttaggaggctgaggcaggaggattgcttgagcccaggagttcgaggctgcagtgagccataatcacattactgcaacactacactccagcatgggcaacagagtgagatttttgtcgcaaaaaaaaaaagtaaaagttaaaacataaaataaatttactagaagggtagttcaagtaccaagaataatgaaaaataaaccaaaataagacacattatagtaaaactaggaaaatttaagttactgggaaaaaagattaccacatattaataactgaagttattatcagcaaagatagatgcatagagtgaaatagtatcttaaataaccttaaaggccataattattagcctagtgttttatacccagagaatgagggctatactaagagttggccacagatgtcttcttaattaaaaacaatactggttgggcatggtggctaatgcctgtaatcccagtactttgggaggccaaggcaggcagatcacaagatccaggggttcgagaccagcctgaccaacatggtgaaactctgtctctactaaaaatacaaaaattagacgggcgtggtggcacatgcctgtaatcccagctactcaggaggccaaggcaggagaatcgcttgaacctgggaggcggaggtcgcagtgagccaagatggcaccactgcactccagcctgggtgacagagcgagactccatttcaaaaagaaaaataaaaaataaaataaaaacaatactaacaacaaaaaactattaaaggatatacttcagcaggaaaaaatctgaacccaaagaaaaggcattgagatacaaaaatactgtaaatatggaaactgataaaatattttggtgagaataatatggactatgtaaataaaattatacctctaagcaagaagaaaatgaaagagcagaaaagcaataatgaagcaaataaaaagtatggtgatcaggaagatcaggaaaagaaaaagcaaagaatgagaataagaaaatagaaacaattccagctgtgtaaataatcactaacggtagacagattaaactcaccttttaaagagactgaaatgatcagaatggataataaagcaaaatctagctgcatgttgcctacaagaggcataggttagaattttaaaaataaagggatgtatagttatgcaaaatgggaacagtgagtgagaaaagggtgctaaatacctccttgcacattttttgctgtggcaagtttctgtgaatatatagttatttcaaaatagttatcaaaaaggggagtggataaaaagctatagcattcaagtatcaaccgagataaaggggcatagcaatattaataccatacaaaatcgaatataagacaaaaagaatttaatagggataaaaagatcagtccataataattgaaagaacaatccactgagaaaatataataattgagaacctgaatatacctataataaaacccagaactgtatgaaacaagttcttatggaattaccaggagagagaaaaccacatagtagtaagattccagtatatcactatcagaatctgataaattggaccaaaattagtaaggatgagatttacaaaatacattggctttatctgatagatacctagaattctctctctggcaagcagacatacatttttagagagtatttacaaaaagtgtacagggcatttcaaaaattaaccacacactatatcactaaagaagtttcagcaaatgtcagggattgaatatgacatagacaatgtgctcgcctcatcattcaattaaatggtaaatcaacaaatctgctttttattttttattatttttagaaatagggtatatcactttgtcacctaggctggagtgcagtggtgcaatcatagctcactgcagctatgattgaacctgggcttaagccatcctcctgcctcagcctctctagtagccaggactacaggtacgtgccaccatgcctgactaatttaaaaaatattttgtagaaatggaggtctcgctatgttgcccatgctggtcttgaactcctgggctcgagcagtcttctggtcctggcctcccaaagtgctgggattacctgtgtgagctatcatgcccggcaaagtcagtttttaaaactattcatatggctgcaaacctaagaacttacttcaaaagaattcccacaaaagaattaacaaaattcttagaactgaatgataattaaagtaagtatatcaaaatatatgggattcaaatattcacattaatttctaactttaaatgcactcgtttaaaaaagaaacaagaaagaaatgagtgaagaaggtgtctcaagagctagataaggctgggtgtggtggctcatgctgtaattcctgtactttgggaagccaaggtgggaggatggcttgtccgcaggagtttgaaatcagcctggtcaacataatgggacccccccaccatctctagccccccccccccgaattgtttttaattagctaggtatgctggcctgcacctgtagttccaactactactgaggttgaggtgggaggatcacttgagctcagctgtgaggttgaggctgcaatgagttgtgatagcatcaccatactccaacctgggtgacagagcaagactctgtctcttaacaaacagctagataaatgtaaggaaactataagaacagaaataaagacagaaatacaaatgaatgagataaaataggaaggaatagaaagggtcaaaaacgattaggattaagtaaaagagaacaaaaatatatgaaatttagaaatcatgagtactttgagcaattttataccaataaacctgaaaaattgtgcaactgtaattatctaggaagaaaagtattaacaaactcaagaaaaatagaaaaaaattgatacccattttaattacactgatattatcaaagcctcccttgataggtgtttcatggactcaaatatgtgtctcaaatctaatggcagatgctgaaaattgcaggcaggttatttaagacagtcattttactcatgaataattctgtgtagttctctttcctctggagagaagtagaggtttttcatttaacaatgattaatttttttctagtttatcctggggagtctggcttgttataaacaatactggaggaataattttttggtaaataccgtttgtctgccaaattgatgatctctttagagagtgtttttgttgtctggttggtgtttttttttgttttgttttgttttgtttttttttttaagagatagggtgtcactctgtcacccaggctggagtgcagtggtacaatcatggcacattgcaaccttgaacttctgggtttaagcaatcctcccacctcagcctcctgtgtcactaggactatagatgcatgccaccacacccggctaaaattaaatttaaatttaaatttaaatttttaattatttttttttttggtggagatgagggtctcactatgttgcccaagctggtccccaactcctgagttcaagtagttctctcatgttggcctcccaaagtgctgggattacaggcgtgagccactgtgcccaaccaagataaattcttgactgtggaatttctagatcaaaagtttcagtgcacttactggttgagaaaacaccatcccaggcaccatctcccagtgctgcagaggggaagactacatggagttagaacagctagagttccaggactaaccccaccctgtcacacatcctttctcacttagctactgccagaacaccaaaccccttcaatctgtatgtctagtgagatcatgtaatttattgtctgaacttggacatacactaaactgcatgtcaggatgacacatacatgcggggacagccttggggggttttgtcatcttactcatgacccctattgttcaaagcacgtctcccataaatctgacttgatcctctgtacccctgcccctaccacgcccacacccatatttttcactgtggccttcaggtctgcacacagcagatctgcatacattcggtctctttgcgaaatgtttcttttgcttcctgaattcaccagaaatgcagctctccgttgtgaacactcttctccctttgacttggtgctgcattttaggtgttattgaccgggttaagggatacgcagaaacatttctgggtgggtctgtgagagtgtttttggaagagattagcattcgaatccacagactgagtaaagaggatctgtcctcatcaatatgggtggacattattcaatctgatgaaagcagggatagaataaaaaggtggaggaagggtgaatttgccctctcttcttgagctggggcatctatcttctatccttgaacactggagcttctggttctcaggccttcagactctgggacttacattactgagaccgctggttctcaggcctttgacctcagattgagagtaacaccgtcagcttccctggctctcagatcttcagaccaagactgaatgacaccaccagctttcctgggtctccagcttgcacacagcagatcatgggacttctcagcctccataattgtgtccagttcctataacaaatccgctgttacatatcttatacaaatcctattgcttcccttcctctggagaacttgaccaatacacaccctcttcaggggagctattttttctcttatactccttgtatatcagggtgagaatataaaattcaaaggcttccttcttgcatttcactgctatttccagaccatttatccatctttttggggctggggagttgggggaaggaaagatttcactctatctttgaggcttagactacctgacttgaaatattccctcctctttatggctgttgtctggtggcatccctaccactcctcctcatggctgaggatcgactgtcagctataaacatttatctctacatagactgccatcacaatgaccagcaacttcaacaattaacatgatagattggctctttgatagtattatgtagtggccgggtgcggtagctcaggcttgtaatcctagcacttttggaggccgaggtgggtggatcacctcaggtcaggagtttgagatcagcatgacctacatggcaaaacccaatctctactgaaaatacataaattagcttggcgtggtggcacgcctgtaatcccgcctactcagaaggctgaggcaggagaattgcttgaacctgggagacggaggttgcggtgagccgagatcgtgccactgcactccagcctgggtggcagggcaagactccgtctcaaaaaaaataataaataagaaaagataatattatgtagttactgttattcattttacatttgataatgtagtgtggaagttttttcaaagagtccctttaaaaattagatgccaatctgatatatttacacatataagcatgtgagtgtctggatttgcttccaatggtaaaggaagattggccatgagttgataatgactaagatgggtgatgtatggatggaggtttattatgccctctctactttttatgtttaagggttccgtaacaaaacagcaaatgaatctgggtgttccaaaccaccatgagctcttttttccttgactgctactcccatggaatcactcagtgtcatagtcagacttaaccttgtcagcccagaaattaccacctccaaaattcccatgtcatgcctctcattctcacagcactactgcctgtatttcaagctcccttacttattctaggaaattccagcattctcaacctcattaagagttccattttggctgggcatggtggctcacgcctgtaattccagcactttgggaggccgaggcaggcagaccacttgaggtcaggagtttgagaccagcctggccaacatggtgaaaccccatctctactacaaatacaaaaatttgccaggtgtgggggtgggtgcctgtagtcccagctacttggaaggctgtggcaggagactcgcttgaacctggaaggcaaaggttgcagtcagccgagatgccactccagcgtgggtgacagagccagatgacaatgtctcaaaaaaaaaaaaaaaaaaatttttttttaaaagtgctccatttcattgacccaaccaccacattctctcttgttcctcatcccctttgtgtattcatttgcctcctcgtctagcttaaatgatgttgaaaattcttgccacgtcttcaactcccttgctttttttctttctgacatacttgactaaggaaattctgacagttgaagtctactgtctgccatcctgggaccagtggttgagcagctgaacatttttaggagaaattcacccaaatgggctgacttatttatctttaaattcatgtttacaacatttgaactggcattcaacactgtccagtaacctaccaaaattttcctaatgtctgcctaccaagatgactaattcatcagcctctcctctttcatcaatcctgttgcccaccaattatagctgatgatatccttcgcgcatcactaaagtgataaaattaatctgagagaaatattttactttctgattaactaaatcttcaaacctcttacatctgcattcccttcttcctatctattctttcctttccctaaataacaatttctccacatgctgtcagaacaattttccttcccaggaacttagcttctttgatggtctgcactctgtctgcattactagtctactagtttacactggatcattcccaccagggcctaggctagctgggacttctcaaactgaaatttgcacatgagtcatctggaagtctcataaaaatgaaaattatgattcagtaggtctggggtggggcctgcaattcttcatttctcaaaaactccaagctaatgcatgggttcatgcatctcattctttgagtaacaaggctttagtgcattttagaatccaagtaacaggtgtacatatggtagaagtacaagcagaagtgatatgagaagtaccaagcacagcacaggtatcaagcctcaaaagaaaaacaggccatatctctgcagaagcaagcaccttagggccttctgctaggtccaggtcgaactgtttagtgtgcagattatgaactggtccagaactgtccagtggcagttgtggggattggggagcttagagcagtggattttaacaactgtgcttgagtatttcaacaatcagtaatttgtaccagtatgtaccagctgaatgcagcaaatatggtttggatattcatctccaaatctcatgttgaaacgtgatccctagtgttggaggtggggcctagtgggaggtgtttcagtcatgggggcagatctctcatgaataggggtgctgtcctcatggtaatgagttaatccctctgtgagttcacatgagatctggttgtttaaaagtgcctggcaccccctccctctctctctcgctttctctctcacagtgtgatgctcccgatcctccttcaccttccatcatgattgtaagcttccttagtccttgctactagcagatgctggcgccatgcttctcatacagcttgcagaaccatgaaccaaaataaaccttttttttttaaataaactacctagtctgagatattcctttatagtgatacataactaagacagcaatctttatgtcatatgacaaattttagaagaaattaacaaaatattcagagagacagctctgagctcaagttgggaagaatattcttacagtgccaaccaaaagtgaagtgggctgagtgaaaaataatttcctattcctgaaaggatttaatcccaagtgaagtatttgtcacagaatacatagagaattgtttgggttacagaaaaggggtccagatccagacctcaagagaggattcttagatctcatgcaagaaagaattcagggtgagtccacagagtaaagtgaaagaagtttattaagaaagtaaaggaataaaaaaatgctacgccacagagagacagccctgagggctgctggttgcccattttatagctatttcttgatgatatgctaaacaaggcatggattactcatgcctcccccttttagaccatatagggtaacttcctgacattgccatgacatttgtaaactgtcatggcattgtgggaaggtagtagtgatgatgaccagaggtcactctcatcgccatcttggttttggtgggttttagccagcttctttactgcaagctgttttatcagcaaagtctttatgacctgtattttgtgctgacctccgatctcattctgtgacttagaatgccttaaccaactgggaaggtagcccagtaggtctcagcctcattttacctggttcctatttaaggtgaagttgctgtggttcacacctctctgacatttgaactagataatttaagattccttgaaaccttagattcaatgagttctactccagtagagaactattatcactccagtgtcatcttaaaaaaaaaatctaaaactcaattggacttcaaattgcagtttacttgacgtcacagtttacagactgttcagattttttcagaaagaaaaattttaaaatatttaatggatcaaaaatagatattctttcccaatctttctaattcttttctaattttctttttctttccttattgcacctaataagtaaatttttcaagagcatagaaaaacagtcaataaacaaaaatcagtttctgaagactcgtggtaaacagttggaaagtgaaattatgataaagaaaaacatttacaagcaaatgcagccagaacatgatatacttagggataagctgaacaaaatacatgtaagacctgtttgtatacccaaaactacaaaatagtgcttgaagaagtaaaagaagacataaataaatggaaagatataccatgtgattggaagatttaatattgcttagatgacaatttttcccaaattgatctatagattcaatgcatccctgatcaacattgtataggctttttttttcagtagaaatttgagctgattctaaaatttatgtgaaaatacaaaatacctagaatacccggggcaatttagaaatagatgaacaaaactggaagacttacactacccaattcccaacctaccttcatcatgactgtgacattggagtaagactcaatggactaaaatagagaatctaaaaaccttgcttatatggtcaattaaattttttttctcttttttttgagacagtgtctcactctgttgccaaggctggagtgcagtggcaccatctcggcccactgcaacatccacctccgcgttcaggcaattctcctgcctcagcctcctgagtcgctgggattacaggtgcgtgccaccatgcctggctacttttttgtatttgtagcagagacggggtttcaccatgttggccaggctggtcttgaactcctgacctcatgatctgcccacctcggcctcccaaagtgctgggattacaggcatgagccatcgcgcctggccagtcaattaatttttgacaaagttgctaagaaaataaaatgggagaataatagttttttcaacaaatggtactggaataattgggtatctgtatggacaaaactgagcctcaatcatggtatcacaccatacgtgaaaattaactaagtaaatcattaaatataaaagttaaaacttctaaaagaaaacttctaaaacaatcttgaagtggaggcagatttcttagaacatgaaaattgctataacctatataaatgtgtaaataaatgggactttatgcaaattaaagagtgtctatcttttgaaaaactatgtcaagaaaccgaaaaggcaagccacagtctgggagaaaattgcaatatatttttctgacaaagaacttgcatccagaatatacaaagaactcgaactcaatgaaaagtcgacaaaatattcgaacaaacattccaataagacgatataaaaatgaccggctgggcgtggttgctcatggctgcaatcccagaacttgtaaaggccaaggtgggtgaatcgctcgagccccagagtttgagaccagcctgggcaatatagggagacgttgtctctacaaaaaataaaaaatgaggtgggaatgttgcttgagcccgggaggtggaggctgcaatgagccatgattgtgccactacactccctcctgggcgatgggagtgagaccctgtcataaaaaaataaataggtcgggcgcggtggctcatgcttgtaatcccagcactttgggaggccgaggcgggctgatcacgaggtcaggagatagagactatcctggctaacatggtgaaactccgtctctactaaaaatacaaaaaattagccgggcgtggtggcgggcgcctgtagtcccagctactcaagaggctgaggcgggagaatggcgtgaacccgggaggcggagcttgcagtgagccgagatcgcaccactgcactccagcctagacgacagagcgagactccgtctctgaataaataaattaattaataaggctaatattaccataagaagatgctcatatttatttaggcatcagaaaatggagattaaagccctattaagataccactacacatcctacctctgcgagaatggccaaaattaaaaagactgacagtgccagttttggtgagaatgtggagtaactgggactttcaggtattattggtgggagtgaaaatagtatggtacgcaaagctgcaataatcaaaacaaaactggcatggagacagaccatagagactagtggaatggaatagaaaaaacggaaataacccctgtcacatatggtcaaataatttttgacaaggttgctaagatcattcaatgggaaaagggcagtcttttaaacaaatggtactggaaaaactggatgtccacatgcatgacaatgaaattggtcccttactttacaacgtacacaaaagttaactcaaagcggatcaaagacctaaacataagagctaaaactataaaactcttagaagaaattatagcagaaaattttcatgatgttaggtttgaaaattatttctcggatatggcaataaaagtaaaaatagataaatttgactaaattaaaatttaaaacttctgtatatgcgtatgaatagccaaaatcaacaaatgaggaaaaagcaacttacacaatgagaacatacttacaaatcacatttctaataaggggttaatatccataatatacagtataaagaactcctacaactcagcaaagaaaaccaaacagtccaattttaaaaacgggcaaagaatttttttttttttttgagatggagtttcactcttgtcacccaggctgcagtgcgatggcgcaatctcggctcactgcaacctcagcctcctgggttcaagcgattcttctgcctcagcctcctgagtagctgggattacaggggaccaccatcacactaaggtaatttttgtatttttagtagagagcgggtttcaccagttagccaggcaggtcttgaactcctgacctcaaatgatctgcccatctcagcctcccaaagtgcagggattacaggcataagtcaccacacctagccttagggcaaataatttgaatggacatttctctaaagatgtacaaatgagcaacaagcacaaaaaagatgttcagtattactaatcattagggagatacaaatgaaaaccacaaagagatactactattaaaaaacctgaaaatagcaactgttgctaaggatgtggaggaactggagaaattcactgttggtgggattgtaaaatggtgcagatgctgtggaaaactatattgttttcaaaacaaagattgaatataaaattaccatatgatcaaaccactccccttctggttatacatcgaaaagaattgcaatcagggtctcaatgagatacttatccacccatgttcacagcagcatcatttaaaatagccaaaaagtagaagctaacccaagcgtccactggtggataaataaacaaaatgtggtatgtacatacaatagaatattattcagcctcagaaaaggaaggacgttctttcttcttcttttttttttttttttttttttttttgagaaagagtctcactctgtcgcccaggctggagtgcagtggctcgatctcagctcactgcaacctccacctcctgggttcaagcaattctcctgtctcagcctcctgagtagctgggactacagttgcatgacaccatgcctggctaatttttgtatttttagtagagatggggtttcaccatattgctcaggctggtctcaaactcctgacctcaggtgatccacccgccttggcctctgaaagtgctgggattacaggcgtgagccactgtgcccagccaaagaaggacattctgacacatgctacaacatggatgaacctagattcaggacattatactaagggaaataagccagtcagaaaaagataaatactgtatgattccacttatatcaggtacctcaaatagtcaaattcataaagacagaaaatagcatgatggttgccaggagctggggaatagagagaatgggaagttgtttaatgggtacagagtttcagttttgcaaagtgaaaagacctttggagattggttgcacagcaatgtgaatgtacttagtgctatcgaactgtatacagtcatccctcaatatttgtgcaagattggttccaagatcctgctcattgccaaaatctgtggatactcaaatcccttatatagaatggtagtatttgcatataacctctgcacatcctcctatatactttaaatcatttttagatcgcttataatacccagtacaatgtaaatgctatgtaaatagttgtcagactgtgttatttgtattaattttttaatgttgcattttaaaaaatattttgactgctctgcattcggatgaatctatggatgtggagcctgcagttacagaaggcctactgtacttaaaaatggttaagatggttacttttatgttaattaatttttaaaaattaattttgaatagtatggtacaacccctttggaaaacacattggcacttttttataaagtttttttttttttttttttttttttttaaaacagaatcttgctctgttgcccaggctggagtgcagtggcatgatctcagctcactgcaacctctgcctcctgagtagctgggactacaggcctgcaccaccacacacagctaatttttctgtttttagtagagatgaagtttcaccatgttggccaggctggtctcgagctcctgacctcaagtgatctgctgcctctgcctcccaaagtgctgggaattataggccagagccacgcggccggcctcttttctataaaattaaatgtacactttccataatatccagaaactccattgctacacttttacccaagataaataaaaacatgtcctcaaaatgacttgtatgcaaatgttcacagcagcttaattaatagccccaaattggaaagggccatcaataagtaaatggataagcaaattgtgatatttatacaatgaaatactttttagcaatacaaaggaatgagctattgacacatacaacatgggtgaatttttaaaatattatgctgagtgaaagaagccaaaacgaaaaagtacttactgtattattccatttatacaaaattctagaacaggccaaactaatctgtaaaggtggaaagcagatcgtgtcaaagggagaaaacaaaattgacccaaagggcatgagacgggggtgatagaaatgttctgtattttaagtgtgttgggggccatgtctgcacgcagttttggagcaagcaagcaatactctttcttggtcaagcaaatgaaagcgtttcccagattctgataaaaggagcaagagactctctgctagaatattgatttgttccctgacatttacagtgaggtacttgaagaactcccaccaaagctattcacaaatgtgaagctgcagagttttatgtacggtcgtgggtgttacttgccaacatttaccccgactttgctgtactctttcagcatgttgatattctcagtaattttcaggcctttttttttttcctttttttcccttgacttctcatcagctccaaacctcagatctctgtttccttccaatacaatttctgagtccagagtgacatgaagactgacatagctcacccacgaaattgaagtccattgaaaaatccccattgcttggcttacagtccacctttctgtatctcaaaagcatttgattaatctctcctgatttcccaccatgatccatgtggtggttgcaccaggcatcctctctcttcttcttcccacaacttgtctttctgccagggactttgcttccagtgttactgagaagataaggccatcacatgtgactccctcagttacacgttattcttcatgttatttttgattctgcgcttccagctttgccagcaacctaagcctaggtaggtgctcttcttctctgttcattcttggtgctgtagtggctggtgggggttcattccacatataagctattcattgccattaaggctttcacttgcccgttttaaacaattttattccatacaaaaatattccagaactttttgtacaagtcactgcctcatttaccatttgtaccaattgtactaattatatcaatgtacctgcccacaaacaatgtgtaagagggattttcactgcactcaacaatccttagagaggcaataaagcatagtgggtgaaagagctccaccaagtactagccacatgaccttgactgaattagtttgacttctgtgctttagtttcctcatctgtaaaacagggataaataataagacctagtagggatgagttgttgcaaagagtaaatggctggtagatggaaaacacttggcgtagtgctatataatagtgcttagtaagtgctatacacacactaaatctgtgcgtgttggtagctgaaagtagctctgttggggatttcttctataagtaataatgttgaacatttattcacatgtttttggtcatttgttttcttttgggaaatgccttttcaagtcctttgccaatttgtttttgtttttgtttctttttcaaccctggcctacagaactttgccaatttgtaatggcccacaaatatttcttcactgattttcaagctgtttatgagctacggctattaactttctgttatcccgttttattattcgaaaatagcttttcggtctgttattggcctttatatttgtttatagcatcttaacattttttttttcttctatgactagaagattctttccattattgtatcacttaaagtttctattttctgtattttctccttcctcccatccccagtctggcaactgatagaaagtgccttgagctctttggaggaaagtgcccatctgaagtgctcattattcaattttggggctgtttagtaaataataataatgtttctaaagagataactccatactgtacttgtaaatcaaggaatttgtcctccagtctcctcaaagagtgaggctattactagagaagtaccatcattggctgaaaaagatggacatttgaaaagccacatataacaaatgttaaaaaagaagcctccttcttgagattgaacactgtcttctgtagacttccctcaggaaatgaacctccgagagctgctgttgttgcctttgcttctctggccgtttgtcaagctaaattgagtggagctcctgtgtgttgtctgtttaatcgccctctttgacagaagctttctcattacctacctggccctgttgcaaaccagcgcctggaggcagacatattgcacaccatttcctccagggtcttgctgcaggttgtctctgggaagtaatgaaaatctggaatgttctcagtgggcgggcttcagacccactgccccctgccatgaaccctcagcaggccagcaatgtagtaaaagccattagtgaagaaatctggaggagttcacctctaggcaggatgatttgacttttggaagatattctggagttagccaagatatttttatctgaaaattatttctgtcttataactgttccctggaggctctaagaatagcaaaaactgacaaattttgtttttgttgtggtttactttcctttaatctgctaacgaatctttttggctccacatgaggctgtgtctctgcagctgcattcttcagggctgtttcccctcagtgtttggggtattctggcctttgatacagaatcttaatcttaagctgtcttgccatgacaggtgttcattttgcccaagacttcttagtttaggtgaatgtcaggcagaaactcttctctcttcaaaaagaaacattagagcagaataagaaaaagcaaaaccacctttccagagcctttttaataaagggattcttctgtgtttataggttgtttcatgaccttgaggatgacttgcaggcaaaataaattattcagaggttaccttggttttcaaattaataagcaggttgttaaaggaatgctttcaaagccctacttcttagatttcaaatcttacacgtctagcaatttgtttttctttttttttttttttgagacagagtctcattctgttgcccaggctggagtgcagtggtgcgatcttggctcactgcagcctctgcctcccaggttcaagcaattctcctgcctcaggcttccaagtagctgggacttcaggtgcatgccaccacacctggctaatttttgtatttttgataaagatgggttttcaatatgttggccaggctggtctcaaactcctgacctcaggtaatccaccctcattggcctcccaaagtgctggcattacaggtgtgagccaccatgcccatccaagtctagcaaattttaagacacacaagggaatatagtgggttgaacagtatcccccccaaaattcatgtctagccagaacctcagaataggaccttatttggaagtaggttcattgcagatgtcatttccataaggatcaagatgagatcatactggatttgggtgagccctaactctaatgagagtgcccttcttagatgcaggaaaacacacacacacacacacacacacacacacacacacacacacacaagaacgccatgtgaagatggagacaaacactagagttaatgctgccacaagccaaggaattccccgagccaccagagacttgaaaagtcaagaaaggatttttctttttcttttttggagacggagtctcgctctgtaatccaggctagagtgcggtggcgggatctcagctcactgcaacctctacctcctgggttcaagcaattctcctgcctcagcctcctgagtagctgggattaacaggtacccaccaccatacccagctaatttcttttgtattttagtagagatgtggtttcaccatgttgcccaggctggtctggaactcctgagctcaggcaatctgcccgcgtcagcctcccaaagtgctgggattacaagcatgagccacagcgcccagccaggaaagaacttttctaaagaattgtcagaattgtctgtgagagcatagccatgctgacacctttattccagtcttctggctctggatatgaaaaaaaataaaataaatttcgggtttttttgttttgttttgttttttcctgagatggaatcttgctctgtcacccaggctggagtgcagtggcgcaatcttggctgcctgcaacctccatctcccgggttcaagcgattctcttgcctcagcctcctgagtagctgggattacaggcgcctgctaccacgcccggcgaatttttgtatttttaatagaaatggggttacaccatattggccaggctggcctcaaactcctgacctcacgtgacccacccgccttggcctcccaaagtgctgggattacaggcgtgagccaccgcgcctggccaaatttctgttgttttaagccacctagtttgaggtaatttgttacagcagccctagaaactaatataagggggtttgatccttggctttatttacaaacttaaatttctttaaacaaaacggaagctaaggtatttgattacctttttaaatatttcagttatctaacaaactttccaagacacttgtgtcttgatttaattagctatttccctatttcgaacacctctgttgctttcatttttttcttgaaatcataaaaaatatagcaaagtgtacattaattgtaaactatatgtacatttctttgcaaaggtagactctggcattaaaactgttagcatttgggctggtccagtgtgcttggctgatgggagcacagtgctgatgagactaagatgccaattagccctaaagagagaaaagctgtgtcctccatggcccggctagaacgtttgattcacttaacaggtgcatgccactgggcaaccagggagagatgtacccatccattattgttaaaggataaaactcaaacatttatattggtttctctgatgacaccaactttatgttttgacaaggaacattatttatactaatatgtgaaaatagctaaagcttcattcagacattaatctcataggaaatgtttgcacaaaaggcagggagatggaagaccaagacttcacatgacatttcatcacagaccaatggcagaatgagctacagaatgcagttttaacactatatgtctagtggcataatccttctagctttaactggcagctttttttttctaggactaaagccaccagcataataaacatcttttagatctgccttcaccacagaactgtttttaggaaactcatctatgatcccaggattcactgtttgaaaggagttgctggtgttaccttcagagaccttaaattggtttgaaattatatagtcactaaagagattgtgattgttattttaagtttttttttttaatttgagatggagtctcactctgttgcccaggctggagtgcagtggcacaatttcagttcactgcaacctctgcctcctgggttcaagcagttatcctgcctcagcctctcaagtatctgacattacaagtgtaggccaccacacccagctaatttttgtatttttagtagagatggggttttgccatgttggccaggctggtctcgaactcctgacctcaagtgatccacccacctcagcctcccaaagtgctgggattacaggcgtgagccactgcacccagttcattttaaactatgcctcagttttctcctttctaaaatggggatcacaaggacaactacttgatggagataattaatacatgagtttaacataatatgctcagtaattggtacaaaaaaatagcataaataagacctactatttgatagcacaacagggtgactatagtcaatagtaagttaattgtgcattttaaaataattaaaagtataattggattgtttgtaatacaaaggataaatgctggaggggatggagaccgcattctccatgatgtgatttttgttgttttttttttttttttgagacagagtctcgctctgtcgcccaggctggagtgcagtggcgcgatctcagctcactgcaccctccgcctcctgggttcatgccattctcctgcctcagcctcctgagtagctgggactacaggcgcccgccagcatgcctggctaattttgtgtattttcagtatagacgcggtttcaccatgttagtcaggatggtctcgatctcctgaccttgtgacctgcccgccttggcctccgcaagtgctgggattataggcatgagccaccgcgcctggccatgatgtgattattatgcattgcatgcctgtatcaaaatatctcataagtgtgatatacatcctccatgtactctcaaaaattaaaaattaaaaaagaacatgcttaaaacagcctttaaactagtagccatatataaatgttagctgttacttcttctttaggctttggacaaggaacgtatcttttctgtgtaccagtctatttccagtgccaaactatagtgccaagcaaatagtgagtgctcaatgaagatttgcaagcgacttaatagcaattgaaggaacacagagggattgactttgccttgccttcttgacctgttttatgtttttgtttcccttaaactttataatttagggattaggagcagctggttgcttatgttcataactcaaaacacaaaaagagctcagcgggtctaacagggagcgcagcaatgtctttcactgcttagacggtgaacggctaaagtttatttccacgttaactgttttcattgatgaaaactggttagaacattatttttggagtgttagatactgaaaagattgactgtaaatccataattttcacagctgtgttctccaaaattttctttactcctacaagtgaagaatgaaaattacagaaatatatctatgtgtgcataggaagtcgtttgcttttgggaattctccagttggtaattcagttaatttgctacagtaacttacgatctccttctcagagttaacttcctgatcctcttgaattgcaggtgtatttgtcaggtgtggacaggcaggtctgcggttgggcttgcgtcttcctcaacagttctacttctgccaactgggttataaaaagctctgctgcaatctggtggtttaacttgaggtatagtttccccgagagacgacgttaggccttaggtttcataaccagaccaagcaattcaattaatcttactatccatgaagggtaattggatgtaaatagcactagagaatccagccatcgtttatgacgatcattgtaggggctgtttttaggctgtcaatttagtgagctagaaatacatctttcttaaaagtgaaattagggactacacttctctccatcctccatttgctgtctttgaaggtgaagtgataattctggccaggcgtggtcgctcacgcctgtaatcctagcactttgggaggccgaggcgggtggatcacctgaggtcaggagtttgagaccagcctggccaacatggtgaaaccccatctctatgggaaatacaaaaaaaatagacagatgtggtggtgtatgcctgtaatcccaactactcgggaggccgaggcaggagaatcacttgaacctgggaggcacaggttgcagtgagccgagatggcgccactgcactctaggctgggcaacagagtgaaactccatctcacaaaaacaaaaacaacaacaacaacacaaagaaagaaagtgatgatgcttctagtcttcccctaagtaggagatgactcctctggacaaaggatgagaatgaagagtcagggggaagcaggaagccctggaaaacaagaaccatctgctgggtaacctctgagcttagtctgccttttttgaagttcccagggcttgatttatggcacaccatgaactctgttgttacaattctttatttccaattacagcatgatcttcttattgaatgatgagttcctagaagattgatccttgatataccctttatcatcactgtttaatcacaacgcctgccacatagtaggggctacataattgttgaaatgaaatccctccagtttctaacctttcctaacctgttcaggagaattatataacttgataggttcttcactacctttcctgtcgctcaaggaagaactcagctttcttgatatatcttgtgaatttcattccaaaaaagtgaaataaaaatagggcatctatttctacccagaccctgtagagaacgacaacaggccatgtatctgataggtgtgttggccatgtgtcggtgtgctagcctgtgtgaaccttggtccctgtaaggagagggtatccccactaagtgagtccccgtccgtggtaattgtactctatgccagacagtcagataattctgagtggtagagatcggctggatttccaatgtaccctaacaatagactgtgttctatcctgccttggtttacctgagacgcttctgcatctttttttttttttttttttttttttttttgagacggagtctcgctctgtcgcccaggctggagtgcagtggcgggatctcggctcactgcaagctccgcctcccgggttcacgccattctcctgcctcagcctcccaagtagctgggactacaggcgcccgccaccacgcccggctaattttttgtatttttaatagagatggggtttcaccacattatccaggatggtcttgatctcctgacctcgtgatccacccacctcagcctcccaaagtgctgggattacaggcgtgagccaccgcgcccagccgaatcttttcagcctgttccaactcttacctctttatttgagttaccatgactaggactcaattgctggagataaaaaaaatcttgaccaagacaatacaggtagttctttaaggaccaaaaaaaccccatcttctacatttaagaggaaaaccaatctcacaggtctttacaggaacagagaaggacagcagggttagagatctgtacatacattgatcaagtcaggtgtggttatgtgctggacctcagttggaagagagcgaattatctagaaactcagtgaggaggaaagagagcagggataactactgatagtagagcatgtatgtccttgatcgtcgagaaggtgaaggcagaattcatttataagtaaagaagattcatggtatagagaccagatatgttaggggatgatggccttttattttattcctggtagactcacttgaggaataaacgtggagcaccagtggcttgtgcttaaatatgtcttctgtatattttgctcagtagaggcttaattgggataatttctacttctaatgtataaaaaagccagtggttagcacaatttccagaaatattcacaatgtgttccataggaatgatttccccctagtctcatttttgagactagaaccctctggaattacacaatatgggaatcttgtgtgtaaaaagtgtagaagaattaagcttactggtaatatacatcttgatgtcaatcatttgattcattttcttactttaatgatattaacctgtgagatggatttttgattgatggaccagggtagtggctttcagagagaatgccaagaacaccagtgtcttgctccgtcttaactcccaattaaaaaaaaaaacttttaaaataaactttttattttagaatgggtagagattttcagaatagctgtgaagatagtacggagtttccatatactccacacccagcttcctctgttattagcatcttatattaatatggtacatttgccataattaatgaaccaatgttaatattattaactaaagtcaatactttctcttttctttctctttcttccttccttctttccttccttcctcttttatttccttccttccttcctttccttccttccttccttccttccttccttccttccttccttccttccttccttccctgcttcctttcccccctccttccctccctcccttcctcccttccttctttgacagagtctcacctctgttgcccaggctgcagtgcagtggtgccatcacagctcactgcaggcttaaccccccagactcaagtgatcctcccacctcaaccttctgagtagctaggactacaggtatgtgccaccatgtccaactgattttttgatacttttgtggagacagagtctcactatgttgtccaggctgatctccaactcctggcctcaagtgatcttcccaccttgacttcccaaagtgccgggattgcaggcatgagccactggacctggcctaaagttactctttattttacttctttttttttttttttttttaattctagggagctatgactgcaagggctaccatatgtttattgtaatactcaatggtttcctctatgtattgaagctactctattctgaatatggttcttaagccttcctaaccgtaaaaatcacattggagctttaaaaatgcatgttgctaggttcccccactgaagatcctgatttatttgggcaagggagtcgctgggcaagaacctacctttttttttttttaaaaaaacaaacacaggtgatgctaatacaatagtctctagactacatatattttgagaaaatagacctaaactataaagggaaattaagaaatccttagtaccacttagaagttgccatatctatttctgtgatgctaaaggaaaattttactgtaagttgttttttttggcatcaccccagagcataacacacaattagtatctaactcaatcatttctcttcttaaaagcactttgctgtccctcttggatgggcagggccactttccaatgtgctgcaatagcattttgttaaaaccaacatctcatgttaacacaactatttgtgggcttacacaacaagaatagatggagaaatatatcccgggaaggaaaatattattattaaagaaaaacctcaactgactagccacatttttatcctgtagggatagcagaattcacatcatggaaatttttatgttttcctttagaaaaactacttacggagccctttggttataaaacaaaaaggcccggacccatctagattagagaagaagaaagggagctaaactgatcttcatgatgaacttcaacggagtcattcctgaggatggagggaatgatctatgctggaaagggctatgtgagttttctttaaccaggctccagaaggaataggtttccaatccctggaacttagagaagccagtgcagaaatgggctgaagcaacgtgatgaaagagtgagatgctacagaagagacaaccagggagaggttccctggggcagagaatggtggatgagatttaggatcagtgttgccagattctgtctgttgcagattattgcctttttatcctagtcctttgtatacaatagccttgtgttagtgggtcatgttttaaagcacaagaacaaggcagattggacagacctaaagcagtataaggaggtagagtcagatggcccaaaatgatgaaagagaggattggagtaggagtcgggtctgggactcctcagaattataggtgagtgtgctggatatcctcattcatatgcatggcacttcgagttatttgatctggactcataatggcagacagacttaaggactcagggttatattaacaagaaataccctaaagattcttttgtcttcctgcagatctgaaagatgaatattgatagaaacttttgtaacaaaggcatatctctcctaccatttttcctctgattatgttgttctagttgtctgtgattcttattgtcagcacagtgctgaattttcaaatagactcttgcttatgaagctggcagtatttcattatttatgactttgttcaacttcatctagtctaaacacaaagtagatagaagttgtgtttttctattgctgacagcaaaattctcttgcgtgaacatatttctttacacagacaaaagatgttgagcaaggcatgatagtttttgcacagtacagctgaggaggatggatggaatgactgctgcaatataagaaactaagaaaaaattcagggcaaaagatcccaatctatataagctagtaaaactgggatataaacatgaaaattaaagagatacattttcctgtagcctttgtgccataaattatatgaaaagggtgaccaatagaagagagaaatttgttctttaatcctctgggaaatgctaaggagtcatttctttttttttttttttttttttttttttgagacggagtctcgctctgtcgcccaggctggagtgcagtggcgggatctcggcttactgcaacctccgcctcccgggttcacaccattctcctgcctcagcctcccgagtagctgggactacaggcgcccgccgccccgcccggctaattttttgtatttttcgtagagacgggggtttcaccgtgttagccaggatggtctcgacctcctgacttcgtgatcttcccgcctcggcctcccaaagtgctgggattacaggcgtgagccaccgcgcccggccccttagcaattttaaggtaacatattaataggttattgggattaggacatatacaccacagattgactatagatttcatgttccaattcattcatttttttcaccagagccactgaggaaatttttaatataagtcatgaaaaacgatggggcaaaattggaattgcatgattccttgcttccagtaaaaaaaaaaaaaaaaggttaaggattaagtaaaggactaatttaaattgggctccctactccaaccaattattcagattgtctcatttgatagcctcagggtgctgctgatactgaataatttgatccttgtctggaatcttttccttgacttcattattatacttgttcttatctacctcaggttgaaatatatgtgatggtcatggcaggtttcttgataaaagaatttggcttgttttttcaacccatcactagaaggtaccttttggagctatcaggtcatggggaaggctgttctggtaagacctgtccagacttagaaaaccatgacaattagcacccttagaagaggaaaatttggcttagaggcaggtaacagagactctctttagagaaagaaagggttattaaataatctagtgcaacacaatctaatagaagtacaaaataagccacatacataatttaatttatctaaaagccacatgaaacacagtttaaaaagcagatgaaataaatgtttatagtatatccaaagtatcatcatttcaacatgtaatcaacataacaaattattgttaagacacgttttaagttctttttctatacactatgatttaggatctggtgcatacttcatatgtacagcacacctcaattcagtctagccacatttcacttgtgctacagccacaagtggctgctagcatctactacattggttagagcctagtagaagcttattgtacttaatggacatctttagataaccttgtttattgagtccttcacagcattctctactcttatccacatcagttctaaagcttgacgccccttagatgagatagtggccacaactgtctgcctcaacaccaatgtactacttccttttctcttggcaatatccactagagaagcaagaaaaagtagcactcacctccccattcttctttgcagctaggggtggccatgtgacacaattgtggtcaatgagtggtcagcaaaattatgatcaagggtttctggtagctggtgcctccccttccttcttctgggtgttctgaatgtgaggcctggaactgtagaatcccgaataatctcaaagacacatgggctgacaccatgaaataattgaaccaacgctaacattcaccaacctccacatttctttctacaaaaatcactgggcacagtggcccacacctgtaatcccagcacttaagggaggcaagccaggagttcaagatgagcttgggcaacaaattgagaccctgttgctaaaataaataaataaataaataaataaagttagctgggcatggtggtgtgagcctatagagtaggctacttgggaggatcacctgagcccaggatttcaagcctgtgatagtgccactgcactccagcctgggtgacagagcaagaccttaactttaaaataataatacactgggcacggtggctcacaccagcactttgggaggctgaggaaggcagatcacttgaggtcaggagttcgagaccagcctggccaacatggtgaaaccctgtctctactaaaaacacacaaagtagccagtgtggtggcgtgcatctgcagtcccagctactcaggaggcagagacatgagaatcacttgaacctgggagacggaggctgcagtgagctgagatggtgccactacactccagcctgggtgacaaagccagactcatcttgaaaatagtaataatagtaataataataataatgaagaaaacaccataaaaaccttaattatttaagccattgttcgtggatttctctttgacttgcattttatttcacctctaagtgatgcaaaactttctggagcctgctctgaacagactacactcctcgtttgccctctggcttcctgctagctctgacaatggggcactacagggagacaagaaagtaggaggaaggagaaaagactcccattttccttttttgttccaatcagggttgtcctgaaatacctagggggatttctaattccttactggactctgactgatacatcccctgcggcctcttctctacatggaatttagaaagatagttttaggctaggcgcagtggctcacgcctgtaatcccaacacgttgggaggccgaggcaggtggatcacctgaggtcaggtgttcgagaccagcctagccaacaggtgaaaccccgtttttactaaaaatacaaaaattagccgagtatggtggcatgcgcctgtagtcctagctacttaggaggctgaggcagaactgcttgagcccaggaggcagaggttgcagtgagacgagactgcattactgcacttcagcctggatgacagagtgagactccatctcaaaaaaaaaaaaaaaaaaaaaaaaacaaaagatagttttaaagcataattcagttcatatatacagtggcttctgatatcaataaaaatgaaacccaaagtttcttctacagccagtgagatgttatttctttgatcctttctcctacctctgctctgacacaactgtcagaggcatttgaactagagtgactccatccggaacaggggctgggtaaaataaggatgaggactgctgggctgtatttccaggaagctaggcagtcttagtcacaggatgagacagtaggtcggtacaagatataggtcacaaaaccacctcctgataaagcaatgtggtaaagaagtgggccaaaacccaccaaaaccaacatggtgatgacagagacctgtgggcatcctcactgttcattagacactaattgtagtacattaaaatgctaaaagacactcccaccagtaccagttttaccagtacagtttacaaatgtcatggaaaggtccagaagttaccctatatggtctaaaaaggaaagcaaccctcagttttgggaactcctcaaccctttcctggaaatctcatgaataatccactcactgtttagcatatgattaaaaataaccataaaaatagccaaccaatattccttggggctgctctgcatatacagtagccattcttttatttcttcacttctctaataaacactcacttttctctgtggactcaccattaattttcttgcacaagatccaagaactctctcttggggtctgaattgggactcctttctggtaacacaatcacccagagttccttcctcttccaaatcaaaccaacccaacatactgtcaccctagggactctgcctgtaatagtccttccggatggatcctcactttgctccaaccctccgttggttcagccctctgctcaaataccacctcattagcaagggcttccctcaccacccctataaaacacagttccctgtccctctcaatccactcacctgctccttgtttttccctagtagtttccccacatgatgttttgaaactgccattgcaaaattataaccgagaaaattattacagtgaaagagagctgacctaaccaactttgtcttgcttctaaactcctagctgtcgttgttcactcatgggtgtaggccaaattaactttgggaggaacttagtttatagtttaactttgaaacaaagatgataacagccctttcccaaaacaatcccctttccttcctggggactagactgcttttgcaggactaacaaaattggccaaatgatgagaaattatggtttaggagtcatgcagttggaggttacaagattctgaccctccccaaattgctcctggggataacatcactattgtaaaacctaagatcagtgcttgagatattttgcaaaccctgcacttgatggatcaatatactggctcatctggtcttgtggccccacctaggaactgactcagcgcaagaggacagcttcaactccctattatttcatctctgacccaagcaatcagcactctcaactcactggctcctacctaccaaattatccttaaaaactccaatccccaacgaatttttggggagactgatttgagtaataataaaactcccacacagccagctctgcatgaatgactctttctcttttgcaattcccctgccttgataaattggctctgtctaggcagcgggcaaggtgaacccactggtcagttacagttttacatgcttgtttacccatatattattcatctctcccaactagaataaaactccaaaagggtaggaactttgactattgcattcattgccttatccccattgcctggaacagtttctgagacaggactcatgggaaaaggatcagtaggaaatggaaagagatggtatcagtttcaagtatgatgattttcgagttgccccttgaatattcctgtggacatacccagttgacagagacacttgagtctggagctaatggaagacatatagttagttgaattagatttgattaaagctataggtttagatgagaacatccaggaatggttcatagaaagagaggagagtcatgataaaattgcacaagacataatatcaaagagagagattgatacaatgatagaggtaggaggcagagaaattccaggcagacagggacgggtccctgacaaaactccaccttcaagccgaaaagcctgaaacccatggcccaaagtgagaacttctatccattttcctgcttaaatgttgccttttcctaaactacccatgacccaccccaccccccatcctgtgcctataaagaccccagactcagtcagagagaagtgacttgacttcagagggatggcttgatggcttgacttcagagaagactggccagagatggctggacttaaggggaagattacttgcccatcccatcccctttccaggtccccttcccctgagagccattttcactgttcaataaaatcctctgcattcaccatcattcaactcgttcacacaacctcatttttcctggaagccagacaagaccttgagagctatgagtgcagacaaccaaaaaagggctgtcacactggccctttgccgttggtggtggagggcagccgcctcatgtgatgaggcaaagggcccactgaactgttaacacttaagccgaacgtggctggcagagctgaaatagcactgtaacatgtcctcttgggcttcaggggtcttaggtagccccacttggatgctgccatggggcctgcatagagtttgctcctgctggcacccaaaagcagctggccagatcccgtatttgcttgcctacttgcttcctcccacaaggggttgagtgtggcaagctgagtaaatggagtttatttctgccagcactcaaaagtgctccctctggttcctgcacttgttcactcatattttgcctcctgtgagaggtagaaaggggtgggctgagtaaacaacgcacccctgtcttgaattccacaaaggagtcaagaaaatatcctgcttcaataccaggggggctatgcagcgatgttatgaatgaccatcagattagagagaagtggtgctgcagaagtcccgagaggagaaattgtccaggggaaggtgactcaatgccacagagaagacaggtgagatcaggactaaacttgcccttttggtttggtaagcagggaatgtaagccaaaaataaaattctaagcccttccagctgagtgacggacccctccctgccccccatctctgccaagggcattccaaagaattatgaaaaactagtacaggccgtgatgggaaggaagggtctgacacgcctcattataccctcctccctttggaattcaggtatgactaaccagcactaaccttaaaacagcaatcttaggactgacaaaataaactccttgtagcaataagataccaacatgacagataacaggccctgaaagaaatcaaagtattttacctgaaaacatatttctttgacatattttgaaatggcccggcaaaactgtatcttaggggaaaatctacattctgtagagaatcactttccttttccaggtcttttccctcatccaggagataattaactaagagtctggcacctttttaagtgtgataagaaacatttacagtctattctctgaaacctgctacctggaggcttcacctgcataataagaaccttggcctccacatccccttgtcttaacccggacactcccttctgattccaggtctttacataccacctttactctttcaaacaattgtcaatcaaaaatctttgaattcacctatgaccggaagcctccctcttcacccctctacccctgcaacatacaccttacatgtattgactgatgtcttacgtctccctaaaatgtatgaagccaagctgcagactgactccctcgggcacgtattcttaggacctggggccgtggtcactcatgtttggctcagaataaatctcttcaaatattttaacagagtttgactcttttcctcgacaggaagctttgtcaatgctggtgagggccattgtgtaatgatgaattgagagttttgtggaaagccagattaccatggattgaagagtaaacgagatgggagagtgtgggtttatcttttgtaaagagtgtctgaaaggaggaaagacatttcctaactacaagacagattaggtcaaaagcaaattgtcttttttttggtttgtttttttaagaggaaagatagttggatgttccacacagcactggaaatgagtgactgttgctgaggacacaggccaaggccgacttggaaggcctctgtactctatgtgggcaccatttccagactcgctgttgtgcaaatctgggttcatagaggtgccttgctgagtctctggtactgtcttttcagtaagtcctcttttgagacatgaattgaaagcaccatagaaacaatggaccctcccactctgctctgaagcaggcctagcccctgactccctacgttgctgggtggaagccagtcctctctccaattttgcagatttgctatctaaagaatttgcaggccaggcgcagtggctcacgcctgtaatcccagcactttgggaggctgagggaggtggatcatgaggtctggaaatcgagaccatcctggccaacacggtgaaaccctgtctctactaaaaatacaaaaaattagccaggtatggtggcaggtgcctgtagtccaagctactcgggaggctgaggcaggagaatggcatgaacccgggaggcggagcttgcagtgagccgagatagtaccactgcacttcagcctgggtgacagagcgagactccgtctcaaaaaaaaaaaaaaaaaaaaaaaaaagaatttgcaaaaccttacacgttcctctttttatgtgtttcctgcaagctgcaggtcacatattggaagaagatccttggaacagagggattggtatagccctgagcttcccaaggtaaacacacaagccaagtcctagcagcaccaggttagggtaaataaaaaatttgaaaggagcaaacttgcttttgttttaaaatatcatagtttaatgagaaatttgagccttggtgactgtcttaacccttttttttgtgaatattgacgataggccttgatccatagtatgccacgggtacatgatcctttcacaaatctatggtggtgaaaaatgtctctttataatgtgttgtgtactggtaatctgaggctggaagagttgtggatgtggtaaaaatcagtctttgtggttggcccacattttttttctttggcctctggcaactgcaccctgtgtgtgtgggcataagaacagtatggatccatcaccttactggcttgtcagcaattacataagacagctccactttcactgagagtaacaataataatttcttctgaggacttttctggaaatgaaaacactttaagcaaaaagcagtgatctaatttggaagcaatacctagcagaaagtgtattcgtttcctagggctgccgtaaaaaaaaaagaccacaaactgtgtggcttcacacaacagaaatgtattctttcccagttacagaggccagaagtccaaaatcaaggtgttgacaaggttggttcattctggaggctctgagggagaatctcttccatgcctctctcccagctcctggtgagtgccagcagttcttggtgctccttggcttgctgatgcctgactccaaatctctatctccatcatgtggcattctgtctggatgtctctgtgtccctgtcttcacagggccttcacatgacaccagtcattggaactagtgtgcattccaatccagtacgacctcatcttaacttggttacatctgcaaagaccctgttttcaaataaattcacatgtacttgaactgggggttagggcttcaacatatctttctgcgggaacacaactcaatcaagaacaggaggctattgagaaataggtatttagaagagctcagtaagaatccacatttagcatacaaggaaggaacatggtatgctgagtagtgaattataacttttatgtattcaagctttggtaaaagctggaatccctctggggaaattaagaaaaaaaatcccactttgatagaggctgaaattcttggtagtggaaagcagatgagcccactctgtctagcacatatagcagtttccctctctttaaattggataagtctggcctggaaactagaaatctcggttgacagccataaaccacttagaagtagtcagaattacagtcatttgcaatataccataccctataagaagagcatctccttaatcataatatccaactctcagactatccttttatagacattgaggctacaaaggcattttcttgatggattccatggtcccgggaacttctcagaatctgcatggcttattctgggaaatttgccagacctcagccttttaaatttgtgtaacttacatgatgaatagtgtattgtgtaggaaagcctatcaaaataaaccaaatatttcttctttccttatgattagaaaacctgtagtttgtctctccgagttaggcattacattatgtttcctctgggttcatttcattttataatttaaaaaaactatagtgtattattgtctatctgtgccattattttccttgagtttaaagatgtcacatcaaacagaactcttttttgaactgaatctctattactggggacctgcacgttttgaagctggctaggactaaacattttcttcataccagctgtcacaaataattcagtctgctaaattctaatacactggcagaatgggtgagcagtcccttgaaaagagaattttaaatatcagtctcttctctcttatatcagtgttcagaaattccagtgaaaacatttggggaagcagacagaattagtaataatggaattagagtgctttccacatgcccattttgtgttgatctgcatttaggtggaggttagaactcagtccctaagtcttgaaagtttgatggcatgcagagcaatgtactgagactatgggtcccagtcctcaggaatcttattgcctcacccctcaagaagaaaccaatggtactagtaacgacaaaatgctggagactgtattagtttctttttgctgctgtaacaacacaaaattattatcttatagttctgggggtgagaaatctgatgtgatctcggctaaaaattaaggtattggtatgactggattcattctggagtgctctataggattatatgtttgctttactcttccagcttctagaggcgtcacattacttgactcatggacccctctcaactttacaaccagcaatggttggccaagtctttctcatgttgcgtcactctgacagtgacttatgcctccctcttccacatttaaggacccttgtgattacatgggccacccaagtaatccaggatgatggatccagccaattggcagttttaattccatctgtaatcttaattctcacttgctacatagcctaacatagtcacaggttctggggattacgatgtggacatcttgggaggttgttcttccatctaccacagaagagagtaaatatatcccagaggtcagtcacgtgtcctcttctgatcagaaaggtaggaggcttagttctgaactgtgctgctctgtaagtgtattttactgagtcattctggcactgggtgcagtgagagacaatgcaaattgcaaaccgtatccaatttctgcctcattactgttaccaaaatgccaggggcctgctgctcaccacacagaaagctgatcactgagacaatgagtattatcagggaagaaggctttcattgcgtactgctgccaaggagatgggatgcaagtctcaaattgggggttcatatagcagggaagtaatgtagccacatatattgtgttagtttactctcacattgctataaagaactacccagccagacatggtggctcacacctgtaatcccagcactttgggacgtcaaggcaggtggatcatttgaggtcaggagtttgagttagcctggccaacatggtgaaactccatctctattaaaaatacaaaaatcaacctggtgtggtggtgggcacctgtagtcagtcccaactacttaggcaactgaggcagaagaattgcttgaacccaggagatggaggttgcagtcagccgagatcatgccactgcactccaggctgggcaacagactgagactctgtctcaaaaataaataagtaaataaataaaataagaactacctgagactgggtaatttataaagaaaagagactcaattggctcacaattccacaggctgtacaggaagcatgttggggaagccccaggaaacttacaatcatggcagaagggtcaaggggaagcaagcacgtcttcacatggcatcaggagagaaagggcaaagggggagctcctacgcactttcaaataaccagatctcatgagaactctatcatgagaacagcaagggggaagtccacccccatgatgcaatcatctcccaccagctcccttccccaacattgggaattacaattcaacatgagatttgggtggggacacagagccaaaccataacatacaggaaatcaggaattagggggatgtaaggaagaggagttgtctaaatgcagtgatctggtgagtttcagtttcttgatactatctgggacgtctggtggtcagtttcctgggaaagatactcaaattagacaaatgtaagtttcaagttttaagaccaggagagtcagtttctatgtttactcaaaaagatcacaaacatcagttctacaaggaaattagccagtttcattatttcctccattaccccctaaacctgagcatgaaattgtcatcttttccagtagctgggaaaagctaaagatcttgattttaaatggcaaatctaaagatcttaagaagggcatcaagcagatgcccttcccactcttccatcaaggaaaagtgtctgcttccttgttcatagatgatgccttcttgttgtgtgctcacatggtagaagggcaaggggcctctctcaggccccttttataagggcactaatcccattcctgagggctccacccctctgacctaatcacttcccaaataacttcccaccttgtaataccgtcaccttagtggttagaatttcaacatatgaatttgtaggagacacgaacattcacagcatagtagatacgcaccacatcgatgcaagatattaacagcaggggaaatgcatgcagaaggacaggggatataggaacttgctgtattttcagctcaatatctctataaacctaaaacagctctaaaatataaactctatttaaaaaacaaaaatgctgtctagccagtgtcttttagggtccagatgtgggggccatttacattttggactgcgtagcataaaggaaaattatgtaaagcatgaactgtgtaagctctgacaacatgtccttgtgggcaggagcagactgcaatttctgaggcatataaaacacggggtcctctgcaggaaaagaataaatacaaaatgaagtaggaaataaaatacttatttggaagaggctttgcaagtgagggatcctgacacttaagtttcattaactttatgacatctatcttggcttgtgcgtgctgacacagagaaagtaggggttctgagggaggacagaatgccataaacacagagagagaggcaaagccgagagacccagagaaagggagagaaatcatttgagggccttcctttctacttttttgttgcaggttttattttcttgtgaagccgaaatttgctacccatgagtattaccaacaacgtgcccctgttagcttaaactaatgtgttggaaccaaatacccagcagacgcaatatcccttatgaggaggggaggggcagttggaagtggttccattttgtaagtggcaccactgaggcagaaagccaagcagtaacctgctcaagaaaggcagtatagtatggatggttcaaacagagcctacttctttgattttcagtccaatggtctcttcattgtctttggaggggagttaacacctcctgagaaagccagtgcattacgatctcattacttattctctgcccacatgactggttctgaggttccttgaaattcaattctgtctccgttggagactgagaaataatgaactgaggataaaccagggtaggtgtcatcacaagatgacatttttgacagtatgtccagaggccgctgttcattacagttgcttgttgagacctcctcctgccttccactggagtgatgtgcagtgagggtatttctgtaacttttcctccaggaagtttcctttccactttgatgtaacagaggaaacagacagtcttaatttaagctgaattcaactgtaggctccttaagccctagagttaggatacaactggacaatgtggcaaaagacataacacataccgcagatttgttagaaagaatgcatgcggcaagcgttggccaattattccggtgtcacctggggtggcatgttattttatgctgtggcgctattgctagtgatggccgctgtgtatttgctctccaaatccatggagatagttcaatgcctttttactgtgtacacttggcagctgctaactgcagacataagaacagaatctctgagggtagatggagaagcaagttatgtgaccatttttctgtgttctcaatgccctcactatacgtaaaagtaaagaatacaatttcacactctctctctttttaagcaattataagatgtccaggtcagtgctgagagatttccaaacactagcacaaaaagttcctgaaagtggtcttggataggaggaatgattactctctccactgaggcaggtggagaagtggcagacacagaattcaaacctaggtctccccgactgcagtgatctgttgcccacccactgttcaaccttccattatagtactcaccgaatgccttcccagatggggtcctcaagtccctgcaccatgtgtcatctttgtatctataatatctagctcagttcttcttactttctgacacagcgcctcactctgttgctcaggctggagtgcagtgacaccacataactcactgcagtcttgatttctcgggttcaagctatcctcccctgtcagcctcccaagtagctggaatgacaggtgtgagccaccatgtctagcctcaacgcttcttaaaggaagtgagtgaatgaatgagttgtagccccagctttgatcgagttgctcagaatgtcataaaaaaggtggccatgtggatgttttggtgtcctttttccagggggatttcttcctgtgctggaggttctctcttgaaagttaatgggtctcagcacagtgcctgaagtgatttgtgggttggatcctcttaggcaagagcccatctgtgggaatcaatgtttggcttatccagtagacaaattagtctgacatcactatccctttgagggacaggctgttgtctccttgtcaagagtggatcatttgctgtttagttttccttcggtacagaagggcttgggtttgggggtgagtgattcagcacttggttaatcagctattctgcatggcatcaatgtttttgaatttttgaaataagtcttgtggattcctctccactcctcttctgtttagcaccacctacaccttggtaactctgtctgctgacactcgttctccttcagtttctcccccacattccctttctgctgcctgatgaatctctggggaaaaactacctctcaaggttttcctgtcaaatgttccctggtaatgagaacagagctgagtttttgggtcgttgctatggagaaagtgtgttttctcattgccctattatatttgagtatgttcccagtctgaaatctgtgggtgacactgcatttgcaccccctttttaggtctattgtatctcaattatataagcctcagtgtgcttttttttgttttatttttaacagtttttatgttccccttttaccacccagtataacaggtggcctcacgtcagtggttgaggttgaagaccatgaacctaatatctctcctgcattatattgcatgcattctgctgctcttcatgcagaaagaaaacattcaatttttagattcatgtgaacactacagaaataactaatatgtgatgaacactggctccttccatacttctcacatctattggctattcctgtgcttctaactagtttttatttaacaacattgaatgcttaggcactgatagattctagagctttacctttctttcttcctttttttttttttttttatagctgaaacctttcttctatggaaatggtatgaaaacccgacagggaaaacaaataaccgaggtgagagaaaggggctcagagctcaccactgctcttgttccttgcaggggtccgtcaggttcatccacagaacatcttgggctggcagagttcagatggaaacccactctacaagttgccacaaaaatgaacagactacacggattttgggagcttacagctgaacggggaaaatgttatgtgatcaacacgcaactcatagtcaaacaatgtcctaattgctttaagagcagtaaggtagaccctgagtgtcagacagtatggtagataggacagtgggcattggagatctggtcagaatcctgattcttcaactctctctgagcaaatcaacttgaacaacttgaacttctttgaatctgtttctgacttgtaaaatgaagataatgtgacctacttaactttttccagatttgttgacaggatcaggcatacgattgagtgcaaagtacttaatccagtgtctggcttattgtcaaagagagtattgataaagacattcctcacaagaataatagctaccaccattgattgctttctatgtagtagtcacagcactagacagaactaggagtcttgcctcagtcatctcagtgtcttctctaagcctcttcatgagaaatcttacaaatcaggtcattaaaatacaggcttaatatcttattcatgtatttattcattcatacaacaaatatttactgagcagctcttaaatgctaggcactggtctagtcttgggggacactacagagatctctgccctcatagattagatgttgctttttttttttttttttttttttgagattcagccaggctggaatgcagtggcgtgatctcggttcactgcaacctgcacctcctgggttcaaacaattctcctgcctcagcctcccgagtagaagagattacagacacccaccagcaaacgcctggctaatatttatatttttagtagaggaaggggtttcaccatgttggccaggctggtctcgaactcctgacctcaggtgatccgcctgcatcggcctcccaacatgttgggattacaggcatgagtcaccgtgtctggccagatattgcattttaatggagtaaacagactataaaacagttgtattacttggatggtggttcaaacagaaggaaatctctgagatgaccctcaggttttaatcttgatgtttttacctgataatcaagatctggctttgctcaaggaatctactccatatttaccctctgagttctgagatgattcttttctcctggagttcataatcatgtcacaaatgccacatttatcaatacatgtgatttaaggtcccatatcatctctttgaaaaaaacttgcttggagattctgtgcttgttcatgcttcccaattcagtccatgcatccaatccaattttaaatgtcttctcttctgggaaactgtcctaagtcctttaggtctcccctgatcctagtacagacttatgtctgtcatagcagtaagccttcaatatcccaattcgttgtttatgtatctccctccttactgttctctgtgtttcttgaaggcaaggaccgtcttttatttattccctttgtatccccagaatctagcacatatagcactccatttttttaagctgatgatgaagaaaaagaccaataaaagatctgtagaaatactatatgcgtatttacacaaatgtctatacttagggggaaagtacagctgaatctttcaatatgttttaccacctgctctgtagatgctgtagattggtggctataacttgtgggtctctgtggttggtgaaggtggtggtcaacttggtatttctaaacaggtctttgtttgcatttatctatctgcatttgcttaccgcgagctatgatatttagaaatgtgcttctaatactgttatctcaaagttcttgctctggaatgtaagcatcttgatttagatacagagaatgataggcaatgaaacctgcctgaaacgaattagctaattggtttcagttctcctaaagaatgaattttcatctctgtcctgtcttctttcttcagatcagttcaggacctttctgatgtgatttatcataacagaactgtaatttacatcaaccatctgaatgtccctatgtaagtggatcggggattacttttacttgcttcttgcgtgactcaattttggagaacactcaactgtttactgtcagaatctgttctcgaatgagacagatgtaatatgaaaagttaacagtggcctgtgtctctatgatgtttgctccctcaatctgttatgcattgttttctcaaaagtcattttctaactcccgtgaatgtgattcattgatgatctctgcttcagactataaagagggcttagaaagaagtaaacactcaagagtttaactggcttagtgtttggagttgcccttactgggctcaaaggatgccacttgcctgtaataaccagccaccccaagtcagagccagatggaggtgtgggactacaggcagaatattaagtttggcacctttccaaacaaaagttctttaaatattttccagcataggtaaagaggagaggctaagagctgtgttggagcaggaaaaggaaggaggacatgggggttgtgctcagtttctttgctattgctccaagaaactcagctttggccccagcttttgtaacccacatagctaaacaaactgagcaggttaccacatcttcttcttgggccttgtctcatctctcaccctagcagcagcttctcaaagtattcttccccatcacatggagtatcttctgagatgtgcacaaagtacccctttctccatctagtccatgtctagtgaagttttttttttctaatcatgtattagtgtctcttacagactgaaacctgggacagaggcctcatgccccttgtcagtcttgctccagataaaaatctcatttatgtgacacactttatcctttaattcttcaagcctgtactttgcacatcaagcttctacaagagtagttggtgcttttgtcctgaagtcaaattctatgctttgttctcaagtgggtcatggaccccatcactaaagcacagaagagaaaccgctgcctcctttcggcctatctatattccgctgggctataggcctcacatcttcaccatgcagtatagtcctcatgaccttacagccacacaccctagccccactgctctgaaatccttggaccagccatatgtgccatgcaacattaccttgcctgcactctggcttgtcaccttttcaaacagcagaggagcctttgcttaccccacctgtggggctggtttttcctgtagctgagcaggaccttcatagccagttagtatctgcttctcagatggggaaggtttactaaaagcactcaacagaggccactttcctgacagctgactgcatcccccatgggctaaaccatctaaatctccttcggcaccaacccatttgctttacacctttaagatctcatactatgctcaatttctcaccatcatgcctgagactccgaagattaattccaccaagtctatgttaactgtcctctagtttttctgatgctctgtttgtttccttcacagaacttcacatgttgtaattattttcctgttcctttgcctgttaatttctttgccccttgatacagtttggctcttgtgtccccatccaaatctcatctcaaattgtaatccccacatgtccagggagggacttggtaagaggtgattggatcataggagtggtttcccccatgctgttctcctgatagtgagtgagttttcataagatctgatggcttaaaagtggcacttcccccttccctctctctctctctcctgctgccatgtaagacatgccttgcttccctttcatcttccaccatgattgtaagtttcctgaggcttccccagccatgcagaactgtgagtcaattaaacctcttttccttataaattacccggtcttgggtagtttattatagcagtgtggaaatggactaatacagaaaattgataccaggatagtggagtactgctataaagataacctggaagtgtgaaagtgactttgcaactgggtaacaggcagaagttgaaacagtttggtgagcttggaagaagacaggaaaatgtgggaaagttttaaatttcctggagacttgttaattggctttgaccaaaatgcagatagtgatatatggacgatgaagtccaggctgaagtggtcctagatggagatgaagaacttattgggaactggagtaaaggtgactcttgctatgctttagcaaagagactggtggcattttgcccctgccctagagatctgtggaactttgaacttgagatgatttagcgtacctggtggaagaaatttctaagcagcaaagcattcaagaggcgatctggctttttctaaaagcatacagtcagtcgtatgcattcacaaatagatggtttgaaattggaagttaggtttaaaagggaagcagagcatacaggtttggaaaatttgcagcctgaccatgaggttgaaaagaaaaacccattttctggggaaggattcaagtccaagccagctgcagaaatttgccaatcaccaagacaatggggaaaatatctctgaggaatttcagagatcttcagagcagcccctcctattacaggcccagaggcctaggagggaaaaatggtttaatgggccaggtgcagggtcccgctgctctgtgcagccttgggactaggtgccctgcatcccagctgctccagttccagctatagctaaaaggggccaaggtacagctcaggcagtggcttaagaggatgcaagcttccagccttggcaacttccacgtggtgctgggcctgcaggtgcagagaagacaagagttgagctttggaaacctccacttagatttcagaggatatatggaaatgcctggatatttaggcagaactctgttgcaggggaagagtcctcatggagaacttctactagggcaatgcagagggaaaatgtggggttggagcccccacatagagtccccactggggcactgcctagtggagccgtgagaagaggaccaccgtcctccagaccccagaatggtaaatccactgacagcttgcactgtgcacctggaaaagccacaggcactcaatgccagcctgtgaaagcagctgtgggggtggaaccctgcaaagccacaggggtggagctgcccaaggccatgggagcccacctcttgcatcagcatgccctgaatgtgcgacatggagtcaaagaatattactttggaactttaagatttaatgagtgccctgtcaggttttggacttgcatggggcctgtggcccctttgattttggcaatttctcccatttggaatgggaacatctgcacaatgcctgtacccccattgtgtcttggaaataactaacttgtttttgattttataggcttatgagtagaaaggacttgccttgtctcagatgagagtttggacctagacagttgagttaatgctggagtgagttacgactttggaggactgttgggaaggcatgattcattttgaaatgtgaaaagaacatgagatttgggaagggccagaggcggaataataaagtttggctctgtatccccacccaaatctcatctctaattgtaatccccaagtgtcaagggaaggacctggtgggagatgattggatcatggaggtggttcccccatgctgttctcatcatagtgagtgagttgagatctgatggttttaaaagtggcagtttcccctgcaccgtctctctctcctgccaccatgtaagacatgccttgcttccccttcaccttctgccatgattgtaagttttctgaggcgcctccccagccatgcagcactgtgagtcaattaagcctcttccctttataaattacccagtctcgcgcagttcattacagccgggtgaaaataaactaatacatccctggtaaactctaagcttatcaaaagctgacaatgtctaatggttcactatgatacccttgagcaactagcgtagtgcctgcactcattggccttcaattattgttgaattaatgaatgaattttgcaccctcattttagatggaatgggatgctctaggagaatttgttcttgatttcatggccatatgtagaaagccttgttctagaggcagatggacatacataataattaaacaagccaatgtttacatttgtgtaaaatgcctattatcttgtagttgaatcatttccaatttttcctagtataattttctaatgtgctaaatttagtatttgtaaatgaagttttgagttgccttaatattctctcttcttcttttcttaaataattcatgacctgaagtaccctaaccttttattttctctacttgttctttcctactgtaattttttaaaatctcaggcaacctgagaggcagctgaattcttttgtcatgttgtatcatgtcagcattaccacacaagtttctccagaggctgtcttgtaattacacttgattggctgattattcctgaaaggcaaaataaattttacagctgtctaggtaaactttaaaaacatcctccaaaatgtgatatgtgtgaggcctgccttgggatcatgactttcgatggaactaaaccaatggtcaatgacccatcatggtataggcaagttcaccatcatcaagaaatcagtcttttttgtcctgtgccttcaatctgatatttctctctactagagagcaagaacatctagtcccaaagcctatagagaatgttagtggttgcctagcaacatcatttccagcacaagtttgtggctttctaagcaagggaagggggtaaccttcctgtctttctcagctccctgtgagtctcttgtatttttttctactatgttgacctctggctgattgaaaacatataagatgatgtgtggaaaaactctttcagatagttaagtgtgaatacaagatgggattatcacctctcatgaaagcccattctagtccccgattctttagcgcagtgtctttgcagtcagaatatgaatcgctcgttgccaatttttggtatattctgatgcgagcagaactgcaaatgttggccccgacaagcaaattaaccacctcctaaattattttgttttttcttctggagataagtggcctgttttgtggtctgttctgttggtcccctgtctctcattccccaagcactgcaaggttgatttttaagaatatgtattggtgattgctgctatttccaagtgagtttgatttacctactttgtttattttaggtatcatgcactttctatttgttgagcctccttaactatttctccttatgtttcacgtcttcaaaacttttgtgtcatgcatctgccaagccaaaatcaggagttcaataaagtcacttgagaattataaaaacatttagttgttgggagataaatctctataggtctcaaacatttctgcatgtcttgtgaacagagctgcctttgttctgggatatcttttcaaggatgcttgcacagccaacagtcttggaagatagagatactgtctccctccagagcaaagggaagatttgcttagcctggaaagataatgatagtatgtccttctggagcaaagaaggaacttagctcatggttcattataaaatatgtaggttccctgcacttgagtccctctcctttagcacacttaatttcttaggtctctctttatatttcaccatgggaattggggcttggagaactggtgcaaatgctaatactctattgctgaagctgtcagtaataaagacttttgcctctgactcaggagtctcgtgtcttctgcctgcatctgtgaaattgtggccagacaacttattgtcttgaaagtatggtaaaatatcagacccttcatagttctagtcaagttcttagtagcttaatgctcactagttcagtaaatatatgtgttggaacatatttaaaattggtcttaagatacatttcttttaaggaacattttagaaattttagagacctgaaattctacatgactttctaccaagagaggatcaacttttgggttgaaagaactgaaaatgcaatgatgatcattgcattttactaatcaaaacttattttcaatcttcattttcaataaaattaagttaaaatttcttagctggcataacaaagatagtatggatttggcttaccttacctttctacatatgcccaaagctccggaaaactcaaatgttggaagtaactgatctatatttcactagacttttgttttctggtatttctctcagtgggtggtactgtaatttagcagccatccaaaataaaacctgaaagcccattactcttccctgttcttcattaatccacatccaatcattagtgtgttaaagatctctgttttcaaatattgcatgtgcagagactaaaaagtgcactgtataaaatagagagtatattggtagttaccagaagccgggaaaggtagggggaagggggagatgaagattgattgattcatgggtacaaatatacaattagatagaagaaataacacctggtatttgatagatcagtggggtgactacggttaacgttaatcaattgtacatttcaaattagcaagaagagagtaattcaaatgttcttagcattaaaaaatgataaatattcaaagtgatggatatctcaattaccttgatttgattatatgaatgtatcaaattatcacatgtaccctgaagatatttacatttattatgtgttaataaaacaactctagtcttttaaatatgtcccctattttccacgcttagtatcagaactctctactttttgcttgtttgaatcattgcattagctttctaactggcttctttaattcctatttgtatatttaaaatctgtcttcccaactgggctcagaccagtgtgatacatccaaaatacaaaactgatgctgtttaaagtgtgctagcagcccccctttttacacagaataaagtccatgcatttcaggatggcctccatgaactggcccatctatatctctttggcctcatgtttattttatgatctgtgggatacgtatggctagtgaccgagagcaagggctctggagtcaaagcatctgtttatattatggttttttcatctatgagctgagtgaccccaggaagatttaaatagtattccatggcttagtttcctcatatgtcaggtgggaatacaaagagcagctactcatagggttgttggaagaatttaaaaaataatttgtataaaaacacacattggtccattttgtgctgctatcatagaatactacagactgaataatttttaaacagtttaagtttatttggctcacggttctggaggctgggaaggccaagactgagggtctgcatctggtgagaaccttcttgctgcatcataacatggtagaaggcatcacatggtgagagaatgcaagaataagaaaaagtgaagggtgctgaactcaccttttataaagacaccactcccttgataatgaacccactcctgcaatgacaacattaatccattcatgaggatggaaccctcatgacctaaacacctctcattaggttctgcctcccaacactgctgcattggagattacgttttcaacacatgaactttggggaacacattcagaccatagaataacatttagtgaagtgtcaggcacataacagatattctacaatgtcagttatattaatattaaactgcttgttttcatcatgtgccatgtttttctattctttgtcttgctgtcttttgttttcctttgtgtaaaatgttcttgctctgcttcactatggaacagtggttgacagcatgggctttgggtgagattaaaacaggtttggattcagacacttccatggattaactgtgcaacattacaaagagtgctcaagaagtgattattattatcctatgtacccttcaggattcagctcaggggaaatcatctctgtgccagttatgaggctattaccttttggcatcaaatctatccttccatagttggcattttgatgctggggccaggattctgcaacctgcatttttactttgcctgcaggctccgtgttaggctccctctacttgggaaggaagacagaagcagcagggctgagggaggaagaagggacttccacctcctgtttgtgtcctgtgtgcctcctgcctgctgcctgttcctactaggctgttagttcttgttttatcttttcaaaagacagagatgagggtgaggtcaatgaagcatctgcctcaggaacaaaatttaagggaacactaatactaaggaatcaggataaattactgtatattcaaatataatattttaaaaaatcaaaattaaatgaaaaaaaacccataatgaacaaaatatcaaaattttagtagagaccagtgcccgctgagccacattagagcctggggccactggttttaataaaaacaaactcatcaataatatattcaaaatctactttgttgctaatttcatttttagttgagagaattactgtgtttgacaatttctcttgtccaagagatgatctttaataatttttacttagcttaagctgatacagagtgataacaaattagcttttggcataagtaaaatattaaacttaaaataacactgtgggctgggagtagtgggagtagtggcttatgcctgtaatcctagctctttgggaggctgaggcgggtagatcacttgagcccaggggttgaggccaggctgggcaacatagccaaaccttgtctgtacaaaaaaataccaaattagctgggtgtggtggcacatgtctgtagtcccagcgactcaggatgctgaggtgggagaattgcttgagctcaggaggcagaggtggttgtgagctgaaattgtgtcacagcactccagcccgggcaacagagcaagacttcatctcagaaaaatggaaaataaaaataacattgtgaattttaatacacctacttttcggactttcaatatttttcttttttctttttcttttttttgagatggagcctcccttcattgcccaggttggagtgcagtggcatgatctcagctttgtaacctctgcctcctgggttcgagcaattcttccaccgcagcctcctgagtagctgagactaccagtgcacgccaccacgcctggctcatttttgtatttttagtggagaccacactgtgttttaccacactggccaggctggtctcgaactcctgacctcaagcgatctgcctgcctcggcctcccaaagtgctgggattacaggtgtgagtcactgtgcccggccagtatttttcaattactttaatgttctggaaaaaaattatcttaaaaaatatacaaaattcccagccaggtgtggtggctcacgcctgtaatcccagcattttgggaggctgaggtgggcggatcacaaggtcaggagatcgagaccattatggctaacatggtgaaaccccgtctccactataaatacaaaaattagccaggcatggtggcgcgcgcctgtagtcccagctactcaggaggctgaggcagaaaaatggcgtgaaccttggaggcggaggttgcagtgagcaaagattgtgccactgcacttccagcatgggcaacagagcgagactctgtctcaaaaaaaaaaaaatatatatatatacatacacacacacacacacacacacacacacacaattatgtatctttctttgcctcagctccctgtggttcaccacagcactgccttttcacttatctagttctcaagtttatatgtaggtaactattctttgatgcccttataagttacacgaccctgagtggtcagcatcccccaacttcttagagggacaagtggcgtgcagccacccgagattgagcaataacaggtctcttctttttatgtggctcttccacctacacgtgcctacctgccaactaaacttgcacatgtactgtagtcttccttatccccaaaatgcagcttgcagatggaacgaacaactgccagtccccctcatgacaccaacacgacaaaaaagagtcatcccactaatccctttacttgtggatttaggactttctgcctccactattgcacttggaactggaatagcaggcatctcaacctctgtcacaacagtctgcagcttctctaatgactcctctgctagcattacagatatatcacaaacttaccccaaaatcttacttcagtctaatctctcccacttcaggttcctgtgccacccctaatcctgctcaaagcagccctgagaaacgtcgcccatcacccctccatactgcccccaaaatttttaccccaagttttcattactctttctcgttttatttcttcattattaacataaaaaggaacgtaaggtcctctgagctggccacaccatggtaaagccaaggcattccccgccccaccctccccccatgataatgtactttgtgatattccccctccttgtgaatgtactttgtaacattcctccctgctattttgacaatacatcctccccgcccttgtgaaggtactttgtaacgtcctccctgcccttgagaatgtacttgtaacatccatcccctgcccgcaaaaattgctcctgactccaccgcctatcccaaacctgtaagaaccaatgataatcccacccttctctgactcctttctcggactcagccctgcacccaagtgaataaacagccctgttgctcacactaagcctgctcaggtggtctcttatacggacacacgtaacaatattaagttctctctgtgatttctacctcctgaacagattctgacaacctcaaagtgcagagtggatttcttcctgttctctttccctctcttgggcacttccccacatttatactttgctaattttctgtattccaagaaatatagtcctccctgccctgcacaggcattcatttgttcctgtgcaaattcaatccattcttcaagatccatctcatatgtcatgaaatcattctttaccctgcaccaaatgaaatgtttccttatttcatgggaccatagagctgtactggcatccataccatcttactgtaccttgttttgttgctatttgtgcatatatcctattccgccccgtcctcccatctgagttgtaactttgaagatcagggactgatcttctggtctttctcatctttgaacatttcctatttggtgaggtcaggagctttggagcactagtcacagagagaactggagaaacagctgggtcatgaaacaccgggcttctgcacattggtgggaagcaacaccagtaggtgttgaagttagttttctttacattcccagtgatctcaaagcttgcttccttttttgccatttctgccttgatgctcagttttggtcctgaaaggaacgattaacttttcttctttccttagcctgctgagcacagggtggcatttaaaacagttgagagcgctctctcccctgaattagaaagagagtgatttccaggaagcagaagttcccttgggatgtttgccagtgggagtcaaacagccctgtgtgaatggctttgtgagccaagaccttctcttcacagaagtgatgtgatgctggcaggaccctttaatgaagggaccatggtaattgagatcagtggggatattctgcttacttctatagcaatcaaaacacctcctacaaaatcaaaacattaggaacagcccatcctcagcctcccactggccccaactttgttcttttagaaaagtcaaagcccactgagactggggggtaactttgtcagaagtttgtttatttatatagtttaaagacgattattttcaaagtggaagccaactgatttcagactacaaaaagaattttccaaaaacaaagctacgaggtcaagtttcagcttcatagaagggataatttgggcaaacttcgccaaccacaatagaatatgacatattaaattactgctctggaaaaggcatttgcgtttgtagacctcaggaaaccctgaatcttgagtgcagtctgagctgagagctttccctgagaagcttgcatctttataatactgactgctgacccactttaaggtctttgtccccaaaccacagagagaagaaaacaagataatgcaggtcctactagagactcttgtaccttggtgtatttatgcacccactggtgggcattgcatttccaaactagggccatggttgatttcatgctcaacctcatggcattatttactatagaatagaggatgaaaaccccaaagtatcacactagattcctggtcctttcagtatcttttcaaaagcttggtggggttttcttttagagtcagccacactaactctttttgatcattaagatgctctttgcggtaaccttctgtaggtaaagggagacatggtacattacacctagaggtaaccaaaggagaaaatatatttccctaggtccatctgtttcttgttttaccttctcatttattcattcactgagagcatactctgtgcctgcaccatgctaggagctggtatgcagcataaataggaaatacataatcactgcccccagggaacagcctcttcaaatactcaagcctagtgtaattaaggtagctccctccggatctttgaaaggctttaacagcgatagcccctcaactgagaaactttggatgtactcagtgaactaagtcaaagcctcagatatttgggcatgggaattttatgtaaaaactaaaggtgcttttaaaatatcataagcggctactattcactctgcccgccccccaccaagtggtttcaaccaggggcaattttgcgtcccagggatatttgatggagacatttttaatagtcataactggggagagggtgttattagtatctgataggtagaggccagagatactgttaaacatcctacaatgcacaggacagtaccccaaaaagaataatctggcctcaaatatcagtagtgttgagtttgagaaactctgttttccaccaatacaactgtaactttttttctacttttaatcaagaaagacaactattttgaaaaataatgctatacttgccgagtttataacttacatttcacattaacagtaagctgtaattggtatttacatgtatcttgactatacagttgggtttttttttccctgtctttcacttgttatcacattagatgttgggaaagaactagtatttttgattcccagtagttctgcctgactctagcttatgagcagaaaacctcttttgatcttcaacttcttgcctctaatggcctcagcagacattctatgcatctgcccccatcacctcttgtctctttctcagaaaggtcctgggaatttagtattctttctttagagatagaaaacccgaaagcaaaaggagaaggcttaatcaaggtcacctagcagggctttgcacgggctttctgcctctcccttggctcattattcactggtcccttcgggggaaatgtacactataaatcagaaaagactatcatctgtactctgctaaatgtgtaaaggttaaatttagtcaggcaggtgatttatacttgcttatttcctttaaaacctcatggagaattaagggagttttcagctaggatgacaaggaaggaaatctaatatttcagagttctgctgttattcttcttggagtatgaaactatcatttgtttaaaaattccatgtatccaggaaggcttgcatcagaatacatttttgtagacattaactcatcataatttgattaaacaaaattttggtgttgcatctgttaggaatatcctgagtcacatcatccactcaaggcagagaaactggtctgcaaaagcaagggtcgagaagtctcatgaggaatgtagtagaccgactgggagaaagtttctaagaaatgatatgaaagggtttggtttggttatggagatcataaagtgacagatttttataaaactagtggaactgccagcttaggagattttcacgcactaagtcaggccattcactttctttccttaggaggcaaaaagcaataattcacagttatacataggaaaaaaagcatattccctcctttccaatgtaccgccctcccaccttttctcattacttattttcctttcttgtgatttttttctttattattatgatcaacacatatcagacaatatttggtgtcaaagatgtacttagagtaaacaatatttcctaaggcctcatttacaatattcgaaacttgacctggagagcaggtagatttttatgttagtggccccactgagaaatggagaacaaggtggttcaccatggcgcagggacattttgtgttgggcatgacaaaatatttgaaattaacagttatgcccatcaccacagtaaaaggtgactttcagaatacttaaaattcaatagcttagtaatgtgtgatcttcatccacccctccacctccacctctccttgctatttctgaggttaagacttgtactcttatctgaggaacatgactcagaattagagtacatagtctatggaaagatcatcagccttgacttcctgggctcaggtgatcctcccttctcagcctccgaagtagctgagactgcaggcacataccaccgtaccatgctagttttttttttttttttttttggtagagatggtgtttctccattttgcccaggctagctcaagtgatcggcctgtgtgggcctcccaaggtgctgaggttacaagtctgagccactgctttctttatatcactttactacgtaaatgacttcttagttgtgaatacatttgatttagtggtaaataaatttcttctccctgggttgtggaaatatgagtttctaatttcatgacagaaaaactcagcaaccaactgtatttcttaattatactttcatctgaatgctgcttgtcttaatttgttatgctacaaatgacataatagtaacccaaagatttgccgtctaaacatgtgtcttttaaaagctcaataacttaatggtgcattttcggctgaagccagtgttttgttcgtacaattcatgattgctttctgttaaaaagcatgactgtatattagaatagaatttaacccaatttattatgctaaggcatgaacaatcaatggaacataaccaacgattgaatggtaagactcgaagaaaaaaagaaactgccaatcaaccaaatatttgcaaaattagttgcaataggctgaattttgtgtcccctctaaaaattcatgtgttaaaatcccgacacccaagatgatattattgggaggtggtgcctttcggggtggggccttttgggaggtcctgccctcatggatggaattagtgatctggaaaaagaggccagaaagagaaaaagagtggggaaaactctgaccccgactctcatcatataacttacatgaacatcagcattccagaagacggctcagtggttctttgaaataatctggaattaggggatgttgtctaaatttatctgcctgcatcttgttccaataaatatataaattataggttcaggacttccaaaacagggcaaaaactgaactatcagaaggcatggcaaaaacagttacagctaatattgagaaataacaaactgtatatacatatactcgtacatttttctatttagtattcatttatttatttttccaaaaggaataagacccacagttttcaatatattctcaagtgatccataaactataagaaattaaaaactgcctgtaaaaatctgcatgataaataatatttatcataatgatactaaaatgtaaacaccataaaggcaggtgttttgtctatttttgttcacttttctatccccagtacctgggacatagtagggactcagtaaatgttcattaaatgaaggaagaaatcacacaaatgcattgtaagagcatagtattctactaaatagctaaagaaaggccaaatgttattcaatacaaattaaatgttcctgctttctctcttttttaattttttttaatttttattattatactttaagttctagggtacatgtgcacaatgtgtaccctagaacacgttgtgcacatgtaccctagagcttagattatagctgttaagcagaatattcaaatgactagtgccttaggccattgagggtgctgtaacaaactaccataaactgggtggcatataacaataaaaatttacttcttacagatctggaggtctgggaccgccaagatcaaggcaccagcaaattcagtgtctggtgaggtcatgcttcctggttcacagatggctttctcaccgtgtcctcacatggcccaagagacaaaggaactctcctccccattgtctctctctggtctttattatgaggtcactaattccatccatgagggcagtcactctcaaaaggcctcacctcccaaaggcgccacctcctaatacaatcatcatggatgccaggattttaatatatgaatttttaggaggaacacaaaattcagtgtattgcaactaattttgcaaatattggctgattggcagtttctccacttttaatgccattcattggctcatgctgcctaaggagtcttgtggcttttgctcttttttgctttatctgcccatttgtcaattttctgcaagcctggtggagaccaagcaactcaatcagctcttcctcttcctattgccctcagagcacctcctagtggcaaaaagcaggcattgtaatcccagcaaggcttttgaaatttgcttctttcatccatttatttagttattgcctgcaaatgtttcaacgataatgtaatgatccctctgctgtccaaaggtttggagaatgttatgaaagaacatttttgtttttttctgtagcctctgcactgacctgtatttctgttcccaggtgacttgtaccacaatttggggcaacagaacatgcatttaatgttgggtataaacttttaataattagaaaactgagaatgccaagaaactattacatggtacatctgtataagagtatttagaataaaatgtatgtgttttcttaacacaaatcaagtaattttgggagttgataaaaggctaatagttcagaaaattaaaattatatgttaaagtcttctatgaaaaatacttaacataattgccatgtgagagagctggtaaacattaatgaaatttcaaaatcagtgcatagaagagggacatggtcgatggttgaaagtaaacagcagactggccagaaatctgattacaaagaccatgcaaaaatgaatagggcctgaagataccaaattccttctgttttaaaccaaattgattttcccctaaaagagtgttaataaaatacttcacatagtgagtttaacttttctttctcagtctctaagttatctggtataccattgtttttgatgaattgcttcttccttagtttatgttttgtgtcatttcaatctaaattggttcaaagggacaccttcagattttcttcattggcaatgactattgagcccctatgagagtacagtagtccccccttatctgagggacataccttctaagacccacagtgcacattttctatacatacatacctgtgagagttaatttgtaaattaggcggagtaagagattgacaacaataacataataaaatagaacaattgtaacaatatgctgtaataaaagttatgtgaacatggtctttttctcaatatcttactgtaatgtactcacccttcttgtgatgatgtgagatgtgagatggcaaaatgcttacgtgctgagatgaagtgatgtgaatgacgtaggcattgtgacttagcattaggctactattgaccttctgacctattgtcagagggaggatcatctgcttcaggtgattctggatcattaagccacaaggatgacgaaggttgggagtcagaaacagacagtgtcaatgactgatgggtgggttgtgtctacagtgtgaatctgctggacaaaaggatgattcctgtccagggcaggacaaagcaggacaacatgagatttcatctgagatttctcctcagaaccacgtgcaattaaaaactaatgagttgtttatttctgaaatttttcatttaatgttttcagaccatggttgaccacaggtaattgaaaccctggaaggtgaaactgcagataaggaggactacagtgttcaactatttacaaataatgacagtggccacaaagattaccttgaaaagagaccgtgagacagtttcacacagactgtgcctggatttccatgagtctctgccaactgctttttaaggtattataccatataataatgttttttaaatcttttagttggaagtgattttttttttcttgagacagagtcgcgtgctgtcacccaggctagagtgcagtggcaagataccagcttactataacctccgcctcctgggttcaagcgattctcctgcctcagcctcctgagtagctgggattacaggcacctgccatgatgcctggctaatttttgtattttcagtagagatggggttttgccatgttggccaggctggtcttgaattcctgacctcatgtgattcacctgccttggcctcccaaagtgctgggattacaggcatgagccactgtggctggcattttgaagtaattttagactttaaaaaaggtgcaaaaatagaatagagtactccgtatactcttcatccagcttcccctgtataactatagcacaacattttacataactatagcacagtcatcaaaaccaggaatacagtactgtttcaattttaaaataatgtgccttagctgatgatgttcttgctatacttttctttctcatctctttaagtctttgttgcttctcttcttcagaaagagtaaaattgaattctagagaggtccactcataagaggcagacctgggcaatgaactcgtttttttgccctgtgctcttgaaactggattctcctttctcaacagcgttaagcttcagttctctatgttgccaaaagccaaagttttagcctggggctcagaatattggcttatttttcctgtataaagaactgtcagactcttcttgacaggggttcatattaataaccctaatctccatctcacggtagaacatgctgtctacttaataagaacttttgccccttttctgttaatgccatccctttacacaaaaaatgaaatacatatatcatgaagctaattatgttcagcttaaatatttatttcaggatggttctaaatcctatctctggtctggtttagtgattttcataatgcttagacatgatgaccatttcaaactgaaaccaagaaagaatatgaatatttctttataaaaataaaaacacttttctttaattaaaataaaaccaagaagtttcatgtgaaaggtcacatttctagctcgtgctgtgttgtcagcatactcctccagccttcttctctctctctctgtgtgtgtgtgtgtgtgtgtgtgtgtgtgtgtgtgtgtgtgtgtgtgtgttgttttgggaatgtgtatagcatcttatcaggagctgttggtttgaggtcaatgccatctccactgtcatcccgatcaacagtaaatacaagagtagcttcatgttctccacaacaatagaaaaatccctcctgggatgttctttgggaagtacaagaaaaagccattaaaagtttcatgttgacctttcttgctttacagaggtttgttggcaggaagtgtcttggttttcttgatggcagagataaagaaaaaaagaaaaaaaacaaacgtgaaaaattccaaggatcaatttgctattcagtttggaaaatagttatttacaagaagcactgtggcatctacaagatcttgctacctcacccaactactccctccctaatccaaaaaaatgagagaaacccattgcagtctgtggttggggttgattaaacatcccttggggccctaatgccctcgaaatgatgtgaaatcactgggttgtgtatcaaaagggcagggtgagctcctggctcatctgactttaatctcaaatggctccacactggtagttgagaacagacaattacttcattaacttttggaaagtctgaggcatttgtgttgctttctggactgtgctctgctacagggagagaaaagacgaggtccaacgaggccattcatgcctgccaagttttcctttctttccaatccaggaaacatacattggtagtgggtaagatccaatattttataatgctaagacagagagactcacccactgaacagcccagagtgaatattccccaagtcttggctggcatgtaagcccagaatcttcacccttactctcaaaccttttgccacctctatccaagaattatttttaataatgtcatgttctcttctttcccttaaataaatccactcatatatgaaaattaaaaagatttatgtgtagggaatcatacacatttgtcagatttatctgtaactttaggaatttttttttttttttgagacggagttttgctcttgttgcccaggctggagtgcaatggtgcgatctcggctcactgcaacctccgcctcccgggttcaagcgattctcctgcctcagcctcccaagtagctgggattacaggcatgagccaccacgcctggctaatttattttattttatttatttaattaattatttatttttagtagagacagagtttctccatgttggtcaggctggtctcaaactcccgacctcaagtgatccgcctgccttgggctcccaaagtgctgggattacaggcttgagccaccgtgcccggccaactttaggaaattttagagaagatttagaggatggtttagagaaaaatattatgcaggagacattgaattgttaggaaaagccactgtagaactgggggctgttattgccaaaaatattagtttggtacaaaagtaatggcgttttttgccattactttgaatggtaaaaaccgccattacttttgcaccaacctaacagttaaaccagcaaaagcgacacacattttacaaaagagtcatgtaattctgtatctgaaactgccagcagcagggtgttttttcatccattactgccatctgaatattttcatctttttgcctctgggcattaaaatgcaactaatccaccacccacaaaacccattagcataaacagtaaaaaaatgagtggtcagactacacagtgatagcactgaaattacttgagtaaaatgcagatgtaatgaggatgtcagtttcagagcagtttgcatcataatagactgaactgtcttggacttcaattctgggttcttttctagatgactattgtcctttttttaaaaaaaagaaaacatctgtgtcctgttactttttttttttttttttttgctttcccccaaagttttctgatgttagaatttagaattttgtctactgtttaaaaaggaaaaagaaaaattttccactagctctcctttgagagaatgagagaattctaattgcttctccactataaaagcacaaacttccatgaaaatggtcatcggagagcagaggtgacaggatgtatactgctgaacttttttgcttccactcttctagataactgctgagaaaggccccctttagctttgatatccaaaaggcaaaacaaagaaggtaagcacctttcagcagggcaaggacaactaatgtgttcttctgcccactgcagctgagacccatggtgcacctgcattcttttaactgagacaacaaaattctccctttaatccccttttggaaggaggagggagagagtactaccatgatgtatgtattttcctttccttacctctttgttcctgagtttttgcttttcagacaataaaatcattagaattagaagaattattattattattcctagtaatgtagcaactgtcagttccaaacaagcctccttggctctgacaatcccatgctctgctatacaacacagtgaaaattgggagcataaactcattctgttgcctcaacaaaattatattatggggtgaagtctattggggatggggcagggtacttcatagcatgaagagaatgcagaataatgttcttagtcccctgtctgtgtggcctattgaaagggaagagattataaaccctactgtggagttaataaaagtagaatctgtaggccagggactgcacgcaagttgacctctgttggggaaagctctgggggtacagtgctgagaacctctcctgggagtcagatgttttttgaattatctttctgtttgaagaagaatctgccttccattcattcattcagggctcttttgagtagcccatgtttcaaatgagccaggagggaccagacatgtgattataaaaatacattgaaattgccaaggtggagtctacagcagtggtccccaaccattttggcacacgagggaccggttttgtggaagaccatttttccacagaccaggagtggagaggggaggatggtttcgggaagattcgagcacattacatttattggacacattatttctattattattatattgtaatatataatgaaataattatacaactcaccaaaatgtagaatcagtgggagccctgagcttgttttcctgcaactagatggtcccatctgggggtgatgggagacagtgagagatcagaaggcattagagtcttataaagagagaacgaattagatccctcccatacgcagttcacaatagggtttgtgctcctatgaaaatctaatgctgcggctgatctgacaggaggccacgctcaggcggtaatgtgagtgatggggagcgactgtaactacagatgaagcttcacctgctggcctgctgctcgcttccctctgtgtggccctggttccagagattcctggtctacaggaactcgtctctcttaggtcttttttcttgaagagggatttgctttcccaaacttttttttttttgagacagagtctccttgcccaggctggagtacagaggtgcaaccttggctcactgcaaccttgacttgccaggttcaagtgatcctcccacctcagcctcctgagtagctgggactacaggtgggcaccaccatgctgggctaattttttgtatttttagtagagacagggtttcaccatgttgcccaggctggtcttgaactcctgggttcaagtgatctgcccacctcagcctcccaaagtactgaggttacaggcatgagccaccgtgcccgacctttctggaattttttttttttttttttttttttgagatggagtctcactcagtcgcccacgctggagtgtagtggtgcgttcttggctcgctgcaagctccgcctcctgggttcacaccattctcctgcctcagcctcccgagtagctggtgccgccatcacgcccggctaatttttgttttttttggtatttttagtagagacggggtttcaccatgttagccaggatggtctcgatctcctgacctcgtgatccacccgcctcagtctcccaaagagctgggattacaggtgtgaaccaccgcgtctggccctttctggaattcttgaatctttaataagattctaggctatatgtgcctttggttgaattctcctgagttgtttctatttctctgagtttgccatttttcttcctctattaagtatctgtattccagggttttgtgtaattcaccaaagcttttataataatttctaagaacaattttgatcaaagacctaagaagacaaataaaattcttcagtaataggtataattttcatcaaatgattgctttcctttttttattgttagggctctattgctaaacgtgaaaggggagctgtctcatagataaaaccctctggtgttctgaaggatgaatgggaacagtggaggcaatttatcagaagcctgtttttctctgccaggtcctccagcccatttcccccaggtccatggagaggaaactctcataggaaactgacataaacatagacatttcactttggtccagccaatctaccattaagaatattcaaatccatttatgaatggatcttgagaaagaaaaaatatattgctatgttggttattttgtaaacgcccaatgggttcactttgcttgcctaaacagagccaatttatcaagacaggggaattacaaaggagaaagaatagttcacgcagtgccagctttgtgggagacaagagttttattgttactcacatcagtctccctgagcattcagggactggtgtttcgaaggataatttggtgtgtagggactcgaagtggggagtgctgattggttgggttaaagatgaaatcataggaggtcaaagtgagttcttgctgtcttctgttcctgggtgggattgcagaattggttgagccagattaccggtctgggtggtgtcagctggtgcgtcgagtgcagggtctgcaaaatatctcaagcactgatcttaggttttacagtagtgatgttagtcccaggagcaatttggggaggttcagactcttggagctggaggtcgcatggcccctaaactgtagtttctaatcttgtagttaatatgttagtcttgggaaagggttattatcaattttgtttcagagttaaactataaactaaatttattcccaaggttagttcagcctatgccaaggaatgaacaagaacagcttgaaggttagaagcaagatggagtcagttaggtttgatctctttcactgtcatagtttcctcagttataatttttgcaaaagcagtttcactttctagtgtctaatattttagtaagtccttctccttcctcccattttcctacctttttgatcctttctctgtgctacttgccaaagtgtgccaatttcaattcactcatttattcaacaactactccttgagcatcatcatgcacaaggcactagactaaacactaaggattcatccgtgaagaagacagacaaaaaaaaatcttgtctttgcgaagtttacgttcttgtgagaggaaggcaataagcaaataaaagagtaaaacatatgagtcagatggtgcccaggagaaaagtgatgaagagaaggatatatgaaatgcttcttcgtatgctgttagggcaggggagagagttaagttttggcaaccatggtcaggaaaagcatcatcaaaatggtgacatttgatcaaagacctaagaagacaagggaataaggtgaacagataaccagtgcgttgcgatttttgggtagggctcagtggtgaatgctcctgtctgctccacacggcatccacagaggcgtggtggtggcaggtgcctgtagtcccagctactcgggaggctgaggcaggaaaatggcgtgaacccgggaggcggagcttgcagtgagccgagatcgcgccactgcactccagcctgggcgacagagcgagactccttctcaaaaaaaaaaaaaaaaaaaaaaaaaaaagatggtcctaatttcaacaccttgtatgttaagtctctggataagcattaccacctttaacagtggtttataagtaaaaattgtattttgccacaaatctgcaatttgggtagggctcagtgaggaatgctcctgtctccacacagcactcaacagaggcagctgagccgaaggatgggggtatgtttccaagatggcgccctcatgtggctggtgagttggtgttggctgtcagcttgggagtttggctgggggcctcagttcctctccatgtgcagtgtgcacctgtatgtgcaggaatggaggaatggagttatcatttactgagaagtgaaaggctaaaggaggagcaagacatctggagtcagatgttggacacattaagcgtgagatgtctgctaaatattcagcaggcaactgggaacctggagttcagaatggaaattataaaaagaaattgccctaccaagggaattaacatccttgtctttcattactagttaattatgctgagctgaccaagacaggaaatggccattacccatacttatccctaatagaatgtgtatatttatccaaatgtggtagttttaaaacaagttctttgacattcttcccatcaagagatggaatctatgtcccctttccttgacctaggcaggcatttgtggttgccttggaaccaactgggtatgacagaagtaatgttatggaacttttgagggtgaggcataaaaggcaatacagtttctgcctctctctttgggatgttcatccttgaaacccagccaccatgctctgagaaagccagggccacatggaggtgcacattgcttgtggagaggaactgaggaccccagccgaactcccaagctgacagccaacaccaactcaccagccacatgagggcgccatcttggaaacacattcctcatccttcagttcagctgcctctgtgagtgctgtgtggagacaggagcgttcctcactgagccctactcaaattgcagatctgtggcaaaatacaatttgtactgtataaaccgctgttaaaggtggtaatgcttatccagagacctaacatacaaggtgttgaaattaggaccatcttttttttgtttttgagagggagtcttgctctgtcgcctaggctggagtacagtggcgcgatctcggctcactgcaagctccgcctcccgggttcacgccattttcctgtctcagcttcccgagtagctgggactacaggcgcccgccaccacgccaggctattttttaaattatttttagtagagacggggtttcaccgtgttagccaggatggtctcgatcttctgacctcgtgatctgcccgcctcggcctcccaaagtgctgagattgcaggcgtgagccaccgcgcccggccaggatcatcttctaaaaaatttttttttagccattgtattgctagtgcctggcattgtctgagtatatgcagtaggcacgcaatagctgttttaaatgaatgaaccaagatgaaacatctgtgaccatcttacaaatggaaggagggaaggttgaaaacactgagaaagtctcctagtttggaggaatagagttcagctcaggaagaacgtagttcagggtaatttttttttttttttttttttaagacagagtcttgctctgttgcccaggctggagtgcagtggcatgatctcggttcactgcaacctccgcctcctggattcaagcgattctcatgcctcaggctccagagtagctggacttacaggcacatgccaccaagcccgagtattttttgtgtttttagtagacacagggtttccccatgttggccaggctgatcttgaactaacctcaagtgatccactcgccttggcctcctaaagtgctggggttacaggcatgagccaccgcacccggccagggtagttaaaaattgtatgctctgaatgtgtaaaacaggttgtccaagaaatcttatggacaataaaagtcatttactttggaaattattctaaaacattttgaaatagagcaatgttagaaatgagatgctgcctctgctagttgcctcagagctggttagttagcagaggatagattttctcggtttaatagccataaaggatcttcatattctgatttgatctgcaaatgtattcaacaaagtgactgcatgatgaaagcaagaaaattatataaataatttccactccaatttttcgtatatgcccaaagtcataccagtgtagagccttaacatgtttgtatgtaggggacagggaacagaagcgtattaatagacacagggccattcaaggatcctctacaagacagtcattcctgattgactagcctaaatcagaaaatggtgtgtatggttaggccaaaattagtctcttctttttttttttttttttgagacaggtctggctctgtcacctaggctggagtgcagtggcacaatttcgtctcactgcagcctcgacctcccgggttcaagtgattctcctgcctcagcctaccgagtagctaggaatcacaggtgcgtaccaccacgtccggctaaatttttgtatttttagtagagacagggtttcaccattttgcccaggttggtctcgaactcttgacctcaagagattcacccgcctcggcctctcacagtgctgggattacaggtgtgagccactgtaccttgcctacatcctgtattttctaaaacatgcattgcatttataatcatagtgcatattttaaagcaaagacaggaatctgggtctcttaactcaggaaaagatttaggtttaagttattgctttgcatatatgaattataataaatacttttcatgtggctgatgttagacagtgtagagaagagaagcaagagcagaaactcagggtccaccagcatccaaagcagtgatttttatgatccttcacagcttaatcatgggtgtgtgtgtgtgcttgttgaaaatgcagagtcctgggtctccagagatgatctcagtaggcccagaatgggatctggaaaactgcaatgtttggccaggctcataggtgattctgatgtaggtgaattctttgagaaacagagatgtgaaggacagtgcttctcttacctacaggactcaggtaggagaaaaatgagacagtcatggctgggaagccaagggacttttgggaaaatatatgtaaaatgtactaaaagcacattatgatgatataacaagatgttctccaccacagctgtgtattagaatcatctggggcactttaaaaatataccagtgtgcagatttcctcataatggtggtaaatgtccctctttcagcatgactaagagataagagaagctgcaattttccaattatctgtgcatagaagaaaaaaaaatccaacagagtgcccactgtgggcctgcagcaagcagccaccacaaacctatgggtgcagaaatcaggggagaggagtctcaagagattggggaaaagggtggagggaagcagagaacttagagaaaaaacagacaaagccactcccaaaagataaagtgaaacaatatttacaaagagaatgaacaaggccgggcatggtggctcacgcctgtaattccagcactttgggaggccgaggtgggtggatcatctgaggtcaggagttcgagacctcctggccaacatggtgaaacctcgtctctactaaagctacaaacattagccgggtatggtggcgtgcgtctgtaatcccagctactcaggaggctgaggcaggagaattgcttgaacccaggaggtagaggtttcagtgagccaagattgcaccattgcactccagcctcggcaacaagagtgaaactcggtctcaaaaaaaaaaaaaaaaaaaaaaaaccaaaaaaaacgagcaatgatgggcacttggcagttcagagcccaggctccggagtggggcctgacagtgtgcagaccagacatggagaatccatgcttgttggggagaatcagacacagggagaggagtggtgcttctgggagacaggcacagcagaagaggagacagaacaaaattaagcatcctgcagaaaataggagacacaacaactcttctatctttcctgtcaacatcagccacagaagcaactgcacagaacattgttgaactgagggaagaagctgctcctaactaggtctcctgcccacagaatgaacaggaagaggaaggagtggaccaacttctatagagaacaactgccaaagtcagaagttgcaaatcaaagtttttctgctggtgatgtctcctcgatataaccatgaacttgatgaaaattctaagacaacactcaatatttatgaaatattctccaacctgcatctgggaacatggaaaatatcaatatgttgaatcggaaatataaaaactaggtagagaaatcaacaaaaaataggagaaaatgaagccagagctgattaaattcaggaaaaaaaatagaagaaaatcacaaaactttatcagtaataaagaacagattacaaggtgccccgaagagaatgggttcaaataaaaacttaataaagggtattgaataaaagaaggatagccaagagaatgaaaaggagataaaataaaaaggaccagagaagatagttgaaatggaagccagacaaaggaggttgcatatttgtattattggtgttcctgaagaaaagaaaaacaatataacagaatatttaaaactctaatccaagaaaaagttccagaaataaaagaactgagtcaactctacactgaaagggcccagtgtggtatataggaaaactgaccacaaataattctgagatagctcggaaaattattagacttataaaaaaaaaatcctcaaggcttccaggcccaaaaaatatttacaaagagaattaaagattggcctcagatttctcaaaaataacatgcaaaccaagaaaacactggaacaccattttcaagaaacctaaggaaaaacaagctgctcttcaagtttcaaggtcacagaaaatcagtttcaaactcaccagaattccaggaatacagtacacgtgctcttgctgagcaatttactggagggtgagtttcacccaaccagaatatttctgggaacaaaaggaccaacagagatcatttcacatatttgactgtagagctgagaataatgtaagagttcgttcatgggttaatgaaaaacatggatatgtaaacattatatactgataaagtagaacaaatacaactaaaaaggtgggagaagggagagaaaaggggaaaagtagagtaacaccattgactgacatataggtaataggtgggaatcagtatcatctagaaaagacagatagtaacaggttaagaaagaaaaaaggggccgggcgcagtggctcatgcctgtaatcccagcactttgggaggccacggcaggtggatcatgaggtcgggagatcgagaccatcctggctaacatggtgaaaccccgtctctactaaaaatacaaaaaaattagctgggcgtggtggtgggtgcctgtagtcccagttacttgggaggctgaggcacgagaatggtgtgaacccgggaggcagagcttacagtgagccgagattgcgccactgcactccagcctgggcgacagagccagacttccgtcttaaaaaaaaaaaaaaaaaaaaaaaaaagggagtaagagcactacagaagattagtataaaagcaacccattagaataaagatacaagacccagcgcggtggctcacacctgtaattccagcactttgggaggctgaggcaggtggatcacctgaggtcaggagtttgagaccagcctggccaacatggtgaaaccccgtctctactaaaaataaaaaagtagttgggtgtggtggcacgtgcctgtagtcccagctactcgggagaatcgcttgaatccgggaggtggaggttgcagtgagccgagatcacaccagtgcactgcagcctgggcgacagagtgagaccccgtctctaaataaataaataaataaataaataaataaataaataaaagacacaaaattcataagccaaaagaaaacgcaagaggatagacacagtaaatataatacattcagcaattacaatctaaaatatgacagaattgacatcaaacatggtagttatatcaaaactagatcggcttaatttgcctattaaaaaagattattttcggattggctcgtatagcaaaaactcaactgtgtgctgcacacaagatacacaccgaaaatgcagcaattgaaatagctaaaaataaaggaatgaacgaaaatttaccagacaaatggaaacagtaagacagcaggcattgcaatcccgatacagaagtagagacttcaagccccaaacagaacacaaaagaaatatagagctataaaatggcccttgggcatatgaaagaatagcccaattattcataagataaatacaacttaaaattgtactgagattgtactcttcctgacccatcatattagccacagcaaagtctccccaaatctcattaatcttttttgcgcagcagctactcctataattctatttggcagcacttcagttttgtataaattacctattgattaatccccagaccattgggagaatactatcaatatacctcaatttaagaatcaagattataaggcattatcttttcataattatatatgtatgtatatatacatttggctagacatttttttcattagctttaaaattgtcagaggcgtctgaaccagagcaactccattttgaataggggctgggtaaaataaggctgggacctactgggctgcattcccagagggttaagtcattctaagtcacaggatgagattgtaggtctgcataagatacaggtcataaagaccttgctcataaaacaagttgcagtaaagaagccggtcaaaacccaccaaaaccaagatagcaatgagagtgacctctggttgtcctcactgctacactcccactagagccatgacggtttacaaatgccatggcaacatcaggaagttaccctatatggtctaccaaggggaggcatgaataattcagcccttgtttagtaaataattaagaaataacaataaaatgggcaaccagcagcccttaggttcactctgcctatggagcaaccactctttattttcctactttctttaaaacttcatttccttttcctctatggacccgccttgaattctttcttgcatgagatccaagaaccctgtcttggggtctggattgggacccctttctggtaacaaaatgatcaaagttaaagctgtagttactgtaactgagttggccttggaatgccatcccatatagtgccatgtttgagagctggttttcatttcattggtggcattagaaatgtactattatattagggttaattcgccctgctaccccaactagctagctacctccccttgggccaggcaaaatggaacagtagcttgtacatatgaattgttaacatgtacatatcttcatacagcagtcatgtctaactgtccctaacagggcaagggagatgaccggtcattttttctcatgaaaacaagatacactcaggtgagttttgagtttgttcaccatgcagaatgtgacgagataagtttaattttctagcttagtgtttttagcttaaaatgttgcaatctaaagctaaaatgttcacctgaggccaaggacaacacagcaaaaacaacagggccaatgtgtcctcagacctttggaatcgcagtcagatatcactatgaactgagtgtttgtgtttcccccaaatccctatgttgaaaccctaatccccaataatgggatgtggaggtgggacctttgggaggcagttaggattagattaggtcatgagggcagagcctcacgatgggactagtgttgaagggaaatgaagagaccatcttattcttcaccatgtgaggatgtgaccaagtatcctcatttttctaagaaaaagagaatgagttactatttttttctcttcttttctccattttccagtttcccatgtcctacttagccctttagaaatgcaattataattgtttacctctccttcacgagacactccctacagggcaaggctgtctaacatgtgtttcaaagctccagtgaaactctccctcaccaggagactgctcaggagacaacagtcaatttacaacccaaattatgcccgctacaaaactctcccccacctggagactttcggacacctttgtaatcgaattctgtccacaaagacgtcaactcaaccgcctggtagataaggcaccacaacgagtacagggacctccacctgctcactgccttccctgcatgtcattcgtgccaggccctccttttatttatttatttatttatttatttatttattgagacggagtctcgtctgtctcccaggctggagtgcagtgagccgagattgtgccactgcactccagcctgggtgacagagcgagactctcaaaaaacataaataaaataaataaatatcctacactggtcaggacaactcccttcaacaaggaattattccctgcaaaatgttagtagcgttcaggatgagaaaccatgctttacagataatcagctgtcttaatttttatttccctggaacttttccctttgtctctcatttgggacaaacttgagggccaaaatatggcagcaaaatgttttagatcaagtaaagactgtaaattaggtctatgaaatattttcccagcactgggagacacatgttggccccaacttcctactcagacttgcaattaagacacaacaggtgtgggtacccaacatgcgaagacttctcactggtctgtacgtcagtaaatggtcaagattgttactatggaatcattcacaccagcacaatggtgctcctccaagaatgtatttatttacatgaaaacaccattttatacaaattgaagacacatcttaaaagaagggtttgtccaggcatgccttcctcatccccttatattgccacttccattttcatcttcttttgtatcataaatgaaacttcagactggttaaagaaaattgaatctgcctcttctccccacccaaaattacttcgattatttaatgtctgtagtcatccttcaaagaaaagtcttgcccggggttattttatttaatttatttatgtaatacagtgtagaaagcgatcatgtcataagcaatgattctgtacaatcatcctgcagaaaattgttttggagaattcttggtaattgaagaccagcagagcacccctccccacccgccccgtaaaagtgcttacaatgaacagggattcttttctttatcaaagacccaaagatacgtggacaaaaaaagaaaagcttgaagtctcaatgcctaatgtgtgcacataaaacaggcacgaagaaacaaacgtgtgtatcctcttaattcctatatcacaaatatagcagaagcagcaatctgtacagtaaaatgcagtcatggaaaaaaaatctctctaaagcatctgaaatacttaaaaatgtttaactttaaaatgcatagtgatcaggaaaggaatacttaggcaagagaagcagctgaactcccacgttcacatgaagcatcccccatcgattcttaaagcatatgtaaagtaggacttaattgggtcacaaaccacaagaataatatacaactggctaaggggctatgtgataaataatcaggagagaatctattcatgcactagtttgatacagctaaattctttacagtacacaaaacccattaataatgtagtatagagaccaaaatgtaaagagagatagaatacattactgatgtgtggattaattcaagttcaggcatctacttgtgttacagcacagctgtcaaaaggcgataatgagtaaatcataaaacgggtttgtttcttcccacattattctataaatggacaccgatgggtagtgaagcaatggttttgctgtccaacttcagaggctgctgtggcgggggtctagttctgcatctgctcaaagaacttgtaggttggattttcgtagccgttctgctgcatcttggacaggtggcgctcctctggggtgacagcggcgtcaacctgaaaaacaagaggagagctgagtaaaaaataaaaatcaatcttttaagggtgaacatggagaagcagtaaaaagataaggagtacagtactcttcttttgccaagattgcagaacacccataattttctcccccactttgacatcttggagcagaacgcctttgcccaccagttacacagatgctgtgctccatctagccaccaggtggcggtggaaaccttgacgcgcttgcaacgtgtccagtggttgtttctggttccccaactccacagtaagtggataaacccagtgcaatggtattttttcctcccctgttgggtccataaaggacaaacagagtcaacggaagcctgttttacgtggaagtgttttggtaaaatagataaaaccacaagagtatcatggagggagattcagcaaagtatactgtatcttgggtgacactcaaatctgtgtagaaaaatactcgatttcctggactgctgaatttagtctagcccatttctatcaaattttatgtttgttaaaatgttaaggagaggtttgagaatcaattaaaacaataacatataccaaagggggctattatttggcacaagaaaaaaggaagagcaaggacgacgccattctagatgatgtaattttttaaaaactgagaattaagatactatagaagtatgttcagctcaaagtttaaaatcagaccctctctgttaatatgttgctttacctctaaggtcaggccagtaactgaagacgtttttctccccctgtcactgttagagctgtgtgtggcatttactgtctgcaggttgggcagggtacttacccctacaacgtgggcagtggctgttcttgttttactatatttgttatacctctccccgttcgcagaagagaggaggtccttaactctgctgaatgagtatgttaaaattcctcttttgtaaaaccatggtaagatgaagagaataaatagaaagtcatcagaatgaagaggcatgttttccagagaaaagtttggatgtaccatagagaagatattccttcaaagggatatttcctagaatgggctgctcattcatctctgggagaatactgcaggcccattcccccttgttgagtgttgccaagtgacattcctcccttatgcagcttttccccctacacaccccatctggcatggatctgagcctacacagcaatgcccctgaagccaaggaagaaaaagtaccagcgaggatgtagtgtcagcagtaagacatgaggtctcgagatggagctagatatgtcatgactagaccacactggctgataacaattcagactaaaagatctgtcaatatggccgggtgcagtggctcactcctgtaatcccagcactttgggagcctgaggtgggtgcgtcacttgaggtcaggagtttgagaccagcctggccaacatggtgaaaccttgtctctactaaaaatacaaaaattagccaggcgtggtggtgcacgcctgtaatcccagctgctccacaggcggaggcaggagaatggcttgaacttggggggtggagtttgcagtgagccaagattgtgccactgcactccagcctgggagacagagtgagactccatctccaagaaaaaaaaggccaggtgaggtggctcaaaatcccagcccttttgggaggccaaggcgggtggatcacgaggtcgggagtttgagacacgcctggccaacatagtgaaaccccatctttaacaaaaatacaaaaaaatttagccaggcacagtagcacgtgcctgtagtcccagctactccagaggctgaggcagaagaactgcttgaacccaggaggctgaggctgcagtgagccaagatcgtgccactgcactccggcctgggcaacagagggagactctgtctcaaaaaaagtaaataaataaaaataaatctgtcagtataatcaggtcccctgtggtcccttcggatagccccacttcatgaagtgattgactcttttcagtctgggagtgaggtggaatgactaccagtggctaatcccaaggcagctggaataggtagatatacagctccctcatcccttgggacagaatgttccatccattatgtgcccattttttttgagttggagtcttgctcttgttgcccaggcaatctcggctcactgcaacctctgcctcccaggttcaagtgattctcctgcctcagcctcccgagtagctgggattacaggcacccgccactacgcctggctaatttttgtatttttagtagagatggggtttcaccatgttggccatgctggtctcaaactgacctcaggtgatccgcctacctcggcctcctaaagtagcactaggactacaggcatgagccgccatggccatgtgccccgattcttacgtttccatttatggaagagactgtgcgccactgtgaatccctcccatctaccaccctgtggctcagagctgcctgagttcccctgcatccaaaccctcagcttactccaatgacagacctaggcatctccccttagcacactcccaccaacaagctctgaccaaggccagtactcagaggactctgctcaaatggatgctcagcttcactgtccttctgggagcaaatcacagatattttccttatcctctcctctttcctttgctgtgcactgttgtcaacaaatgaggtcacctggctttaactggtaactgtgtaattagcctccaacttgtaagttaaaaaccatggttaaagattagcaccaatgaatgagagatttcattcactctgtaaatctgtgtgccaggagacagcctatctgcagcagtacgccatttgaacttgggcatcatttttgctccccatcacctcgaaactgagaactcaaagaatgcccaggttaaaaaaaattatcttgcttaggagatcaagcacaaagctgctatgtttctgattgtagaaaaaagccacaatgctgcttgattgttggaatattatacttttatttcttccaggaggcacatctaccatcacactggctgtcaacaatcatttgcatgcatcaagggcaggggaacacctggcaatttgataggtttatctcctcttcaaactccaaagcctaacgcttaagagtgccctgctagagatgcgaggctccaaggctggtgcacaatccagacctctaactctcctgtcttttcttggcttctgttttgctacttgataatcctattaccttttgccactgagaggacagctacattttgccattcctgccatggggcagcttggccctcagaccttagagggcttaggagctacagaagaagggattatcttgacaaaagggcatccaaggagtatggattggatctttaatctccagccccttgaaagctagatgcgaaaatctgagtactcatgtctatggataaaggaggagcaccaagtaagggtagccttcctctccagcaggctcaccaatctcttcctcatggctaagctacagcagtggcatgggccaccatgtgaaggccagccctaccacgaccctgtgcagacagggcctctgcacagacacaatattatttcccttaaagcagagccagggagggtttgagcccatggtgcttgttctggaaggaatgataagacaatgaagtcagaatttccattttccaactgggcaggaacatctgtcacttgctgggatgaagacacacatacatacaaccactgaatattcattctcttcccagactgcctggattacacagcagcaggaaatgatctgaggtcttcatgtgactctcggtacgctgcaccttcctgagacctggacccctgcactgcatggtggcatggcttcaactggctgctgcctatgacacacgctgaaaagagctgagcccaaatagcctgaccagccttgttctaaaatagctttgaggagaacgtttgacactctttggctaacctccataccccctgacccttttctccctgaacttgattcattggaaccatttagtccttcactgtatccagagtaatttagagctcagctatccgcctgcagggacaagattctatttgggtgaccttagtttctaggtctcctcctattgcccctagagtatttacatgcgggtgtgtgagcttggaggagaggcaggaaacaccacgtttacattttattatgtacagtaaccagcaggatgtggattaatagatgtccttttatacaagggactgagtcaggccaaacgacagaatcctgtcattgagatggaccagacgagtaaaggagggtaagggaactaaggcgaacaatacaacaatagtgtgacacatcaaaggagccacaagtctgcggaaaaaaaaaataaaagcaaagaaaataggaagttttcaagctagtgacttatccctcgtaacctcccagtaactgcctgctacctagttgtatagatgcttgttttcctaattttgatgccatctctctatagttatatataactagaaggcagttgactatgtttatggccaacatcaagcaattcttcaggcaggttcaggaactcctttgctatcccttcataattttttttttttttaagacagtcttgctctgtcacccaggctggagtgcagtggcgtgattttggctcactgcagcctccatctcctgggttcaagcgattctcctgcctcagcctcctgagtagctgcgactacaggcgcatgccaccacgcctggctaattttttgtatttttattagagacagggtctcaccatgttggccaggctggactcgaactcctagcctcaagtgatccacctgccttggcctccccaaatgctgggattacaggtgtgagccaccacgcctggcctgtgatcatttttgatgctttcctttgatcttccaatttctcttcctgctgctcactgtaagccactcctaggttctgcaccccccctcacttttccttatcgtggctttccattcaacctgaccactctctccaactactctacaatgccaacgtcagtgcgtctgtatcctggtgggtcagcttctggccgggaagaaaggacctctaaggacatctttttatacagtcaccagtgtgacagcatattacttagaaaaagtcatatgccatacctccataaaagccaaataaaaggaactctcttcttatttagatcattaatgagataaccaggaggtgggggcggggagacttctggtgttcaagtgatcagatctgtgagaggaaaactttttcacatcctataataaagagaagctgtgcccccaacttctccttattaaaggtgacatgtctggggagagtagcagaaagagctacaatacgtatttttaaatatccagtgtctatgtatgtgaatgtagaaaagtaccgcttgctactaaacagatcctgggattagtgggctttgcaggaacgtcctaaaacaggagcaaggtggttaattcagctagtgctgagatttccagccaccagagggctattctgacatggagggcacatttggggagtggtaataataaagggctattgcttcactgcttgaagcaccaataaggcacagttacctccttgggaaagcgtggccaatggctcacagagtgactctctggccttatggctaagtaaattcagtaagtcaatatttcctgcttatttgaaaaaaaaaaaaaaaaaaaaaaacaacaactagcaagtgctcatttccaaatgctaacaactctaccaataaaaatacagttatgggccacataatgacattttagtccacgacagaccaaacatatgatggtggccccataataccgtattttttactgtaccttttctagtttgtttagatacgcaaatccctgccagtgtgttacaactgtctatagtattcagtgcagcaatatgctgcacaggtgtggagcctaggagcaatagttgtaggtgtgtagcccaggtgtgtagcaggctataccatctagatttatgtacatgtactttatgatgtttgcacagcgatcaaaccgccccatgccacatttctcagaacgttctctccagtgtgaagtggtatgtgactgttctaggcttgtttcatttatacatttgttctcaggagtttttttcctagggttcctatctctgtgatcttctgcgggcatttttcactctaaaaacaaaaaatctcctggaaaccaaagctttcatcatgacttcttcaggcacgatggtatgtaagtacaatggtattctgtcctgagtgactgaggtgagtccaactggaaatattgatgtactcatttttgttcttactgaagtagggttactgattaatgaaggttagccagagccggaaataaaggtatttccatgtacttgagggtgagagtgcctgttaaggtaggaagaggatgttgcagaagcatcacttctgtgggtgcagacgctggaatgctaagaaaaatggtgctctgaaagcccaccgtgctctctcacctgggaacatccctaggctgggttgcaactccctgtgttcaggttctaccatcccagctaaactacatcttttttgaggacagaaaagcggaatgtggtctatttcaacattgctgtacagacacactatggggctgcacagagggctgctttcaggaaggacagtcacaaaggtcttgaggggaaggagctgagaggaaataaacaaaacaaacacgaatgaggtggagcccctcatctagaaaggcttccagttgctctccagtagacagcaaaatgaggagagaagagctgaacagccatccttcccgattttgctcctgcaaggatacctcctggcttaaaaattaatgtcagaatctgggtcaaagtgtcaacttctcctctgacattttaagtccaatgagacactgcttggtaaactgactaaaaaaagagcgttttaattcaggcagctggaagagcacttaaaaggcaaccggttatctgggaggtgagagataccattttccactccctgaggcttgcgcggagaactaaaaggaaggagtgttaaaatgatgtgtcagggattctcaaatccgactgcacatctcattcatttggggaaattttcaacactcagattcgcagcctcctatttggggattctttttccttaggtctgaggtaggacctggtctcacgcacagccaggggaaggagctccaggtggaggccttgcttttatgctcagcatcactggggtctgttacgggctaaaacgtgtccccctagaattcatatgttgaagtcctaagctgccagtacctccacctgtgactgtatttgcagatagggtcgaagaggttattaaagttaaacaaggtcatcagggttgatcctaatccactatgactggtgtccttgtaggaagaggttaggacacagcagaaaaacagagtgaaggtcatgtgaagatacagggagcagacaggcatctgcaaaccaaggagagatgcctggggaggaaccaacctggctgataccttgatcttacactccagaaatgtgagagggtaaatttctgttgcttaatccacccatctgtgttactttgttatggaagcccgaggaagccaagtctttggcctctggcatcaaagaaggcaacttcaacggacagaccggcaacaaagagaattatattaaataaactaaaaagtgctcttgaaggccaggcatggtggctcatgcctgtaatcccagcaccttgggaggttggggagggcggatcacttgaggccaggaattcaagaccagcctggccaacatggcaaaaccctgtctctactaaaaatacaaaaattagccaggcgtggtggtatgcccctgtaatcccagttactcaggaggctgagagtgaggtaggagaatcgcttgaacctgggaggtggaggttgcagtgagcggagatcatgccactgcactccagcctgggtgaaagagcaagactccatctcaaaaaacaaagaaacaacaacaacaaaagaaaacaacaaaaccatgaaaaaaaccaaaacaacaacagcagcaaaaaaggggtcttgaattactcaagtatgaagacatctttatttgctcaaatatggaattaaatttttttaaaaattaatttgagcagaaatgaaataagctgatactaatgaaaacctatcttacactgttttgagggacataagcttagatactatcacaaaaggtgcaatggccaaacatgacagtggggtcattgcttttatgtgctcacactctgatctatgggtcagtccgttcctttccaccctgctgcctgctgttctcttggtttccttcctcacactgctcatccacgtcagtatgaatggggaaatgaggctccaccccaatttccatcagcagcttctgttgtagtctgcagaggttttaattgctgagcaaaatgaaatttctggcttcaccacaaatttcatttatttaaactctgcctgtcctcttctaatcaagaatggtttagagcccatttccttggggatagtggaatcttcaactccctagaaacacctggacttttctctgatggaaaaagcaatgggggccagacgcggtggctcacgcctgtaatcccagcactttgggaagccaaggcgggtggatcacctgaggtcaggagttcgagaccagcctgaccaatatggtgaaaccctgtctctactaaaaacaaaaattagccgggcatggtggcgtgtgcccatagtcccagctactcaggaagctgagacaagagaattgcttgaacccaggaggcagaggttgcagtgagccaagatccagcctgggcaacagcgcgagactgtctcaaaaaaaaaaaaaaaaagcaatggggaatatgaggggaaatctggactctgagcttgaccttgcataatttgaacccttctgtctcggcctcagttccctcatctacaagatgagaagatcaatttgattggtcatcatcaataaatctttcagctctaaaaattccataactcttaaaatatcgcaattaaatgtcacacaaatttttcagtttccctgtgcatataaaagttatgtttacactatactctctgcaagacagtttcctaaaaagttgcatatactgtgagattttaacactttttcccccatccaaatggcatttcaaatgcataaaaataacttattcgtaaattttctttctctctttcttgttttagtatagcaccttgaaactaagatatttcaggtggaagtgcagggtaataggttgcagaactctcaaataacaatcatgtatgttttggtgggccatttggtatagtgtgatttcctgagaaactttaaaggtaagagtctgcactgaaaagtcacattatttactattacctggttgtattgagaggccagactatttaagacaaaagaaatccaagaataaacatgtttagtttttttggaaaaagcaacttcctacttctatttttatttttaacttcttgtactggtttttgttgcttgtgtttgaaaaaaaaaagtctaagagtaatcatgcttttttaaagtcatgcattatcatttgtattattttgataacttcaacacaaattgtaagttgagataacaacacacactctcaataccttgagcagaatattcacggtaagttgcaatgaatgaaaaccaaaacaagaaagaacaactgtaacccaagcatcatggaagcacactgattcgttttttaaaagagatacttagctagttcttagcaaaaagctaagcctaattctctcatagtcttaattcccacttggaaacatgcagtcaagtttacctacctccaccacaccatgatgaatggatgtgtactgtttcttcttcagcatcaccaaggtgatgacgatcactgtcgctatgacaacaccgcccaccatgagtccaatgattgcacctttgtttgaacccacatcttctgcaaagaacaccttgaaaacaaattaagaaaaagaattttaatttctaaatgcaatataatttacaatttataaacgcaattagaagaatttcatttcttaaatgcaggggacatttggatgaggttatataaaaagtttcagtatattctctgcccaactggttggtcaaatatttgatgcttactttaaaaaaaaaaaaaaaaaaagaaatcacatattttcctactaagaatgataatcatagtttatagaaggatgtacaacatgtggcttccccagttcgaggaagtctactttccccacaggtcaaaaccgaagtctgcagggacctgaaaccctttgacaggtggaacatttggtgagtggtgggaagatagcgcttggatctatcaaaagctggaaaggcacgatcatactaatgaaaggaggtcagcattttcctagtcatagcactctgagccctgatgtgtgactctaagtgactgagacttaggtgtttttcaactctgcagatgtcctaatttccttggagggacacttttaatgcacaggaataggcattctgaaacaaaggagttaaacaatagaaaaaaagatatcttgttacctacttttagctatagtaattctgcagaattctaattaacctttagcagtgtaatgctttttaaagcataatgttatttcaaagtgaagtacaggcaacaagaattttaagtcactcataactcatgctttctaactattgtctccagaaaccaaaatctgaaatgttgctttattcttgctctttatttggattaaacataaaaataattttgagaacattgtaaagaaggaataaaatttcatttactgcactacattgcttcatactgtttataaaagcaagtcattatttttcaactttatctacttgaatgaaattatagaagcacaccacaacttttatcatcttgttatataaggagttgatcttatgccagatgaagtaaaactaaagctaaatattaccacgtttgctctgcaacttaatgaaaatacaggcatacatagctttattgtacagtagtgcttacagatagtatttaaaaaaaaaaaacaaaaaggtttctggtaaccctgcatcgaacaagtctattggtgccatttttccaacagtgaacacaggttcacttcatgtctgtgtcacattttggtaattatttaaatattcaaacattaaaaattattatatctgtttggtgatctgtgatcagtggcctttgatgttactattttaattgttttggagtgtcatgaaacatgcccataaagacagcaaactaaatcaataaatgttgtgtgtgttctgtctgccccccaaactggccactccaccccctcaactcccaggctccctatcccttgagagacaacaatattgaaagtgggccagtaaataaccctacagtggcctcttaagtattcaagtgaaaggaagagtcacaggtctctcactttaaagcaaaagctagaaataattaagcttagtgggcaaggcatattgaaagccaagattcttgtgccagttagccaagttgtgaatgcaaagaaaagctcttgaaggagattaaaagtgctactccagtgagcacacaaatgataaagcaaaacagccttattgctgatacggagaaaacttttagttgtctggatggaagatcaaaccaaccacaacattctcttaggccaaagcctaatcaagaacaaggcccacaactgtcttcaattctatgaaggatgagagaggtgaagaagctgcagaagaaaaaaaagttgggagaggttgatttcatgaggtttaagggaagaagccatctccataacacagaagtgcaaggtgaagcagcaagtgctgatgtagaagctgcaataagttatccagaagatctagataagactcctgatgaaggtggctacactaaataacagattttcagtggagatgaaacagacttatttggaagaaaatgccatctaggactttcatcactagagagaagtcctgccttcaaagcttcaaagaacaagctgactctcttgttaggggctaatgcagctggcgactttgtttttgaagccaagactgaccattgtaaaagtcctagggcgcttaagaattattctaaatctactgtgcccatgctctataaatggaacaaaactgggatgacagcacatctcttaacagcatggtttactgaatattttaaacccactgttgagacctactgctcagaaaagactcatttcaaaatattactgctcactaacaaagcacctagtcacccaagagctctgaaggacaggtacagggagattactgttgttttcatgcctgctaacacaacatccattctgcagcctgtggatcaactttcaagtcttattatttcagcctcttattatttcaaaatatatttcaaatatattttgtagggctattcactgccatagatagcgattcctctaatggatctgggcaaagtaaactgcaaaccttctaaaaaggattcaccattccagatgccattaagaacatctgtgatccatgggagatcaaaacatcagcaataacgggagtttggaagacaatgattccaactctcatgggtgactttgaggagttcaagacttcagtaaaggatgtcacagcagatgtggtggaaataacaagagaactagaattagaagtggagcctaaagacatgactgaactgctaccatctcatgatcaaacttgaatggatgaggagttacctcttatggatgagcaaagaaagtggtttcttgcaatggaatctactcttggtgaagatgctatgaacactgttgaaatgacaacaaaggatttaggatatcacataaactcgatgaagcagtggctagatttgcgaagactgactccaattttgaaagctgttctactgtgagcaaaatgctatcaaacagcatcacatgctacagagacatctttttgtgaaaggaagagtcaatcgatgcagcaaacttcattattgtcttattttaggaaattgccacagccaccacaaacctcagcagccaccacctggattagcctgcagcagtgaacatcaaggcaagattctccacgagcaaaaagattaggacttgctgaagactcagatgatcattagcatttttagtaataaaatattttactaataaaagtaaagtatatacatggctttttttttttttagacataatgctattgcacatgtaacagactagagtatagtgtaaatacaaacttttttttttttttgagacagagtcttgctcttgttgcccaggctggagtgcgatctcggctcactgcaacctctgcctcctgggatcaagagattctcttgcctcagcctcccgagtagctgggactacaggcacatgccaccatatgcagctaatttttgtatttttagtagagatggcatttcaccatgttggccaggatgctctcgacctcctgaccttgtgatccacctgccttggcctcccaaagtgctgggattacaggcatgagccaccgtgcctggccaacataacttttatatgtactgggaagccaaaaaatttgtgtgacattttgttgcaaaatttgttttattgtggtgttctgaaatttccaaggtatgcctgtacctccctaaaaaattctttcaatttagcctcaaggtagtcaaatgactgatttttctaagctgaaactaacatactagcaatctggaaaggcaatataaaatatagcaaatgaagcaacttctaaaagtgttttactcgtggtttataacaaaatgagaaattgttcataattattccctttactaaacaaatatgctagctcaacatttttatgaaaagcaaatcattaattagctaatatactagtgtgaggtaatcaggaataaatacaagtctggacatatgcctgtgcctttaagaaaatactgtaattttgtaatattcattgcactaattataatacattatcttaactagtccagtagagggagctgattctcctaattgctgccgctgccattagtcactgtcgcattataggcgttagtgtaattgtggggatgggcttatatgacacaggccccaggccccgacaaatgcaaatctgtacattaatcgtcagctttctaccccaccaactcttcaactctttagtggttccccagtttttattaacctcttcagcaacagcctcatcaagagaaaccctgatcttataacaactgatactagattatcttgccaatgaaaaccatgcttcaaaaagctaaatgtctttctacaaaaaaagaactatgggagttaagaatgcaaatccaaatcccaagtcagttttttatttgctacaattatttggagtcaagtaaggcataaataataatttggaggtgtttcttttagagattaatactaggatttatcaactttatgaatattgaaaagacattttctgcttggaaaaaagtaacactcacacacacacacacacaaaacaaaacaaaagaagtgcctgagataactttaagtattattgctatggaaattttcttaccatttttctgtccaccactgaatgtgataaaattgtcgtcttcattaatttaaccctcttactgcacctactgataagatggaaccctaacataatccacgatttgatttatctccatttctaagcttttggtaaaggattttatataactactagagctgaccacaaaggagatgtggctttttgatttactccaattctaacattaggggggaaaagtgatttcatctgaaaaggaagctgctgtcttctttgcacaaaccttttgatgaataacactatcgggaacatcatggggtcctgctcactccatgatcttactcttgcaagagaagttaaatcatgggaggtaggggagggaatgaaaagaaagagctgggggagaaatgaatgggtaaaggaagacagttccggatgtgaatttaagccacataaagtgttctgtaaaaccaagcagtgtatgcatgtgtttgatccttcaaataaacctattgtaaacctattttcccagaaaacacagtggaagtcaaagtggctgctatattgaaattaattccactttaagtcccgagtcatgcacgaactttgctgccttgtagtctgaaagaactatacatacagcctctttcttttcttttttttttttgggatggagtctcgctctgtcgcctaggcacgatctcagctcactgcaacctccacctcctgggttcaagcaagtctcctgcgtcagcctccccagcagctgggactacaggtgtttgccaccacacccagctaatcttttttgtatttttagtagagatggggtttcaccatattggccaggctggtctcgaatttctgacctcgtgatccacccgccttggcctcccaaagtgctgggattacaggcttgagccactgcgctcagcctagcctatttattttcttcatgttttcatggtaatcctataggcaagcattgtatttttatcttttccttaatttgatttctagcacaggatgaaccagagttaataggtcatttggcaagacaaacagtagtggaaagaggtaaattattttacgtaccaatttttgatgatgaacttcatatcctgagtcatgtcggaattctgcatccatcttcacttcagagatctcctccgtcttgatatttgtcaacccagaacctgtattacatcataattaaagtatgcaggacaaccaattagttttactcataaataataacactgtaagacaaagcctacccaaaacttctttctaggcctgaagttagaagaaaattgataaatgactcttaaagaaaaatgataccctatatttaaaacttcaattactacctattttgaacaaaaagaaatgaaagggtaagggaaacctgaaagtaaggcttctgctgcctttaaatacatgctataatttttgaaaatgggggaaaagcagaagttaaatcctggttgagaggttggcaaggatttgttcctggaatatgttggcttggcttacgggcttattgtttagcctattatgtgtctttttccatgtgcactcattacttcagaaataataataaaaggctttaaaaatgagcattaattacctggtagaacaaaactgctactttggggctttgttccaattacaaataaattatgttcatgtatctatgcagtgaagcgttgtaaaaattatataattttagtcaagtgttctagttacacagattgtaattggttcgtctgctgaataaagagctatagtacataattttaaaaatgcttcttagcaactaacagaatttataacctacgaactcttccttttctataaattgctatatgattcttaacactaattgttctgatgaatttcattattcaaataataatttgaagcttaaaacaaaatgcagagtcatttaaaaaccaaaaacataagtaaaaaatgtaaatgtcagtgtccatgctataacatttaattatcaaacatcagaattttaggatgaaaagggcttttgaagtcatcttctctaccgtgttcccacccaggggcagattgtcagttcctgtttgaacatagaggaatgtatcaatttccctccattttttgatagatttgcctgcccaaactgtcctttttttacatgaagccagaatcagcttccctgtaacttccatcctttgagcctgattcaacacagagcaagcctaatcctcccttccacattaaaaccttgaacaggtatcacgaccctaaggagaggcatgttcctgctggttcttgtcttacttgggctacacattcccaattcctttggctcccaggggaattcacttcctgctcttggcctaatcactctttcaatcttgtctacgagattctgggaaacttgtgacacatcttgctgacactgaaaagcacaatgtccacagcatatgatgtgccagtctaagagcacagcctatacaaggagaaggtaaggataatctgacaaaacctaggaaatccacgctggttgtgacctagcaccatttcctcatccaattgttcaaaaagcttccacttgataacctatttgaaaagagacccacaatcaatgtcactctatacctggcttacagattgtgaagctatcttctctcctttttgctattcagaacttcattttcctatccctaccttcccagctttccacaaagaccacaggcaatggtgctacttccccttcaagttctcttagcctgcagttggtctgggtcataagaacttggacttgggtagcaagatgtcatagtttaaaatatatccacaaatttgctgatactccttccttcaagagggagaacttgattcccttccttcgaatgtggtcgggatgtagtgacttgctctagtgaacagagcatgatagaagtgatggtgtatgacttctgagactgggccaaaaaaggcactaaaacttccttaatctctttcctggacctcttggtgcaggggtgcgagatgccatgttgtagggacgctcaagcagcattacagagttcacatggtaagatactgaggtctcttagtaacagtgacgtgagtgagccacgttggaaacagacccaccaggtccaatcaaaccttcagatgactttagctcaggcagtgtcttaactgcaaccacatgacggacactgtgccagaaccatccagctaaaccacatcccaaatcctgacctataaaaactgtaagaaactaatgcttgttgttttaagctgctaaattctcgcgttatttgctacgtagcaataggtaactaatgggctagggctttcttttctcatgttgatctatctcgggctttaatttcctttcatcagaagttcattctctttaatatagacataaaaggcacaatggaagtgggacagtttccctttctcattctttaactctggtcctctcaatgacctaaccctcaacccccaacttcttgctacgagacccacagagttctctattcttatttattttcttactttaatattgttaagtattttttggttaagtttcaactcattctgctgaaacgaacctttctgacacttatttttatagggtagtgatgctaaaactctcttaattctcactggctgtatattttaatctttctatagcccttttaaatctgagatccttatataaccagtgatttctttagagctcactccttttctgttattaagatctggcaacgtgccaagcacggtggctcacgcctgtaatcccagcactttgggaggccaagctgggtggatcacttgaggtcaggagtttgagaccagcctggtcaacatggtgaaaccctgtctctactaaaaatacaaaaaaaaaaaaaaaaaaaaaaaaaaaaaaattagccaggtgtggtggcgggtgcctgtaatcccagctactccagaaggctgaggcataagaatcgcttgaacccggcaggtggaggttgcagtgagctgagattgtgccactgcactccagcctgggtgacagaatgagactctgtctccaaaaataaataaataaataaaagatctagcaacacaataggttagaactatatttctgagatttttaagaaaactttcttgaacagtttgaagagtcttcccttttagattttggagccaaatatttatactgaaaaataaaagtaaagaatgagctctggccgggcacagtggctcacacctgtaatcccagcactttgggaggccgaggcgggaggatcacgaggtcaagagatcaagaccatggtgaaaccccgtctctactaaaaatacaaaaaattagccggacgtggtggcaggcacctgtagtcccagctactagaggcttaggcaggagaatggtgtgaacccaggaggcagagcttgcagtgagccgagattcgtgccactgcactccagcctgggcgacagagtgagactccatctcaaaaaaaaaaaaaaaaagaatgagctctcggccaggtgcagtgactcatgcctgtaatcccagcctttgggaggctgaggcgggcaaacagtttgaactcaggagttcgagaccagcctagccaatatggcaaaactctgtctctactaaaaatacaaaaatgagccaggtgtggtggcacatccctgtaatcccagctgcatgggaaacttaggtgggaggatagctttagcccaggaaatgggggttgcagtgagctggtatcatgccactgttctccagcctggaaacagagacaaatcctgttttaaaaaaaaaaaaaaaaaaaaaacaaaaccaagagctctccactaaaaactttacaagcccacactacttttgaaatgatactgtgaatacttttggtggtccaaaaaaaaaaattcatattatcaagtcagcatgacagataaattcatgtttacagctcaatagtttgagaagctcttggcagaagagctcttgctataatagttcatgtttgtttagcatgaatagtcatctagggaagactttttacattaagcaaatcttactaaaagacaaaatcagtaagctggcacatagggaaatattcataataaggtgataatgcatgtaataaaatgtgatgagtagtttcaaataaatggcagggaccttggtttgcaggcttacttagaggtctttcttgagttgtgctgatttcaccctaagccctggtgactccagctctctcttcctgtaagtcatgatgagtggacagagccttttgttcatgtgggggctaagggaggtatgtccttcatgacacctcttgcatggctcgggtcaaggacctggtttccctttatttggactgcagaagggtggtgatgaattgtaacagaaagggtagctttctaccctatgtgaagagctcgctaatgtgtttttcttttttattctggtcaaactgtataattagtccttcagagtctattttttctttggaagtaagccaggaggaggagctataatggccactatgcccccaaatcaccactgttattacaatggtccctacttgacactgcatgctggaagctaccatattctgtttttttagatatgagagttaaggagaagccattttcctcagtcatgattataaagcactgggtgggggaaaaacaaaaacctttttttaacttgtttctgaggacaacagtgattattcaaaaacaatgccatcacttgaacggcatgacaatcttgggaaggctttctaagtttggaaaggctaaagatataattcggcacattagactcaagtgggtggtctctaaaatgtgaagaagaaccaaagctatgctacaaaacacggggaaattagcccaaatgtttgataaacttactacaagcacaaaaacagaacacacgcatggcttaatacatgtgcagtaaatactgctattcatagacaaaccttaactagaatcttcctcacttcatatctgagcattctttctcaactttagccatcttactgggcaacccaagcctacgctgtgtatgaaaggaagcttggcttaggccaccctctcttctgaatagaattgttcccttcttctttgccaatccaggtgcctcaaatctttcataacctctctggaagcccatctccagtaagttctctacttaacatgcccctgggttagtactccatctcctcccatcacagaacattcttgttagcacttaatgttgctttgtatttccttgtcttccaaattccatctcatgtttccaaatatgcaaaattccttctattatacctcaagctcctgagagcagggaccctaccgtttaatttctttcaaacctagaaagaatttagtggattgatctttgtgaaatccccaagtgacatcatattcttactgttatgagaaaggttttggatggttttctcccaccagtgtaataccattaactattctctagctcttcctttaaaacacactgtttttgtttgacagcgtttggaggtgtcctttttgttagatttagattaaaaaaaattttttttaaaagaataggccgggcatggtgcttatgcctgtaatcccagcactttgggatgccgaggtgggtggatcacctgaggtcagtagttcgagaccagcctggccaacatggtgaaatcccgtctctactgaaaatacaaaaaaattagctgggcatggtggggcgcatctgtagtcccagctacttgagaggctggggcacaagaattgcttgaacccccgaggcagaggttgcagtgagttgagatcgtgccactccactccagcctgggggacacagcgagactccatctcaaaaaaaaaaaaaaaaaatcaaaaaacaatttttttaaaaaagaaaaaaacattgactggtagtgtcacctggtcctggatgtttcaatagtaacatataggctctcctggcccaatgtagaaatttgataaaattgaatgagtcgaatgagcgctttctaagttacattttatgcttgtagatgaagagcatgtcttttaaagagaagcaccatgaaaaaagtcccaaggcaaatgaccaacctgagctggctgtggttgcaattagaactgaactgaccctcagcccgaggccttacaagttggctgagcagaacaggaatgtcaactcctggctccttgagattcccttacatgacattgacaataaggaggacattagaagaactgaaactgtctctgactcactataatttaagttccccttaaaagcctacagacagaaattcataaatcaacgagaccagctgtcaagacgtgtcacactactgtctctgctgccactgttaatcacagcataaaggcatgaagatgccacaggcagactctcagtcttcatcagtgaccgtgcttggaggcagtcatggctcgagcctgtggtggaagtgtgagggacagggtgggtctcctggtctgctgctgactgtatctgaaccaggcagcaaaggttgacctctgtgtattaatatcttcaaagaaagttaattccctgttctttgactatcgcctggggacattatgaggataaagaagaaaataaatatggaaaagtatgtgttatttgggattaaaatctccctggaatacacaaatttgtcaattcaataactttcttcctctttttgattcactgaaagcactggctactatcagttgggtgaggttgttcatagagtagacaccaggcacatatatgcttctgctgtgctatgacattattcataaaataaaaatgtgtttcttcttaatgtttgtgaaactgtaaaaaaagaagtgtctatttcagtgttaatgggatttttaagtaatacataaaaaaagggcttatgtgcaaaattatgcatccacatctgttgtgttactttagccactcattgagaataagtacatacaacccacaaaacagaagatgtattttgggctctggaaagaaaccaattctggtattttcaggaaatcatgtctacttcagtaactgattgaagtttgagcccagttcagttagaaaattacccatctggacaccaaacaagaaaggagagatgttcacactggtatccaagtcatcacctgagagtctacatctatctgggcttctgtttttaaggacaggctgtatataatcgtctctgtttttgttttgttttgtttgttttaaagaaaaaagaaaaaaaaaaacccaaatttggaagggctctcttttaggtttcaaagggaaagctcagaaacaaaaaaaatcatttcactcggaacttgggaaatgaagagtaaggaatagtcaaggggaatttttaaaagtttggtttctaaggtcacttcaaattctactctgcagtaagtacaattgagagaggcttaaaatgcagaaaggagacaacgtctgctcgagcttaggcccaagatgcggagaggcacaagtcaagcggttctgatacctggtcgagtggtcagtcctcggtcggcagcagggcgggcatcaacaggctcaactgggcacaggaagcaagggacacagaaagcaaacaagacaaatcaagatggtaagtcgtggctcccaaacatagtcgagcagggaaaaaagcatatgcaataaacaagttacaaaaaaggagcagccagaaaagaaccacagtgagttaatcccgagcatcgaggaccaggaggggcaccactttaaatggcttatcgctattgatgtgccagtcctgctccttagttttctaataaaagccctcaccaggatacgcagcaacatcaaagaagaggggtggggagggtggatttccctctgagctagtttagagatagtttcttggcttttgattagaaataaaatattcccagcctagcagaaaaccttaaagatacttccttttacaactgcccaatcttatcttattttacagttaattaactacaaaaggactctgttaaatttccaggggaagtgcaaatatgaatttatcaggagagcaaagttttactatataatctgccatttagtgagtgaatcaaatttgtccttagtatgagggcagaagagggaaaccgcagtctttttctcactttttcaaaaaggctggcttccatttgacagatgacatacagctgaaacgtgtgaaatgaggatatttcattttatatttgccattgttcacaattttccctttttatgtgttctgggtccgacccaaagaaagcagtgtggacagcatgatattcctcaccatcatctgacctttccaaagcacttctgatgctcagaaaatacttccttgttttacgctggcgtttgaagaaacaaggaatggggacaaaagtgaagtttttaggattaataatggtcatagggtaaatgaagccacggaggtaggtgcagggggaagctgctttggtaaggtggcaagtgtaaagggaaaaaggtaagacaaagtgagcacaggtgctgaaggagacacggtgtgctcgatgaaatggcttctaacaatttcagcaaaaccatccagcttactgatgcacacaggccaggcattcaaaggtgggattctcagtccaaatcgattttggatgccacatgttaatagaaacagtgagggagaaaaaaagtggcagtaagccaagtctccaaaatataagaaaatatttccgggagcactaggatatttggatgaaataaaaatttggtcctttctcatgtagagactggcagcatggtggagtcaaaaggagggtgaggcatctaatcccaggcctgggcccaacatttacaatgtctgtggccttgggatgcgccacttctgtggctgtttctccatatggaaacagaaatgttaacatctgcatcttctaattatggtgaggaacaaataagtaacctttaaagcctgtttgagaccctaccagatactacagaactgcactgattaaatatcctatgattaaatattccatagtaactactgatgcgagagtgactattctctagtatttcactagtgcattagaggaagacatagttcacttccttctgcaactcccaaatacatttcgacaatgaggtttggtttttctatacttcattttttttcctatttgcagcaacctgtaatgagtaactgtattactccttgtaaaatgcagttagttgaaaggtcattgtactttgtgagaatttcctgatgatgagggacccaatagtgcttcaactgcagttaagaacacaacagaccacatgcacgagggcaaacgcgtaccttgaagtggtggtgagcacatacatcaatagttacgttattagaaaatgtatatgcaactcggggcagtaagttaagtgtacctgtggtttaaatgcaggctgaggagctggtagtcccacgggccactgctaatgtcaccacttactttctctgtgatctggggctaatcacattctttctgaacttcagttgtgtcacaaagtaaatggtttttccagggttcaaatgcgtatacttatgtgaaagaaacttacaaatgatattgtcctataagtttctctgcctctccccgctcttcttcttcttcttctatttttttaaataggcatgtattatttaaaaacaataataaaaccctaaccctattttttaggaagattaaacaaaactagtttcagtgacataaaccctaatctgctttaaaagattgaagctgatttagtataaattaatgctcaaaaaataagtagctcagggagcagacattaaaagttttttaaaaggcaattatgatatcattgccgaaaaaaaagaatacacaccaacaaaacaaagtagtgtgttatttcccaatccactgcaaatactttccaatttttccaattgacctttacttaaccagacagtaacttcatcaatgaagtgctaaaaaacatcttacattggctgtttagtaatttaaaaacaagaaatacattatcttagctttaacttttaatagagttaaaataaaatgtaagcagaaatgagttattctcttgctctcagtagctttgaatcaaatcctttgctgtaagaggagagaaacagaatggtcagacctctgggatttttgagtctgttacttctggtattctttgtaataaacctcaactattaaccgtgctgccttgtacaaactctctaccaggccaaaggtaatgaggaatcagcagtacaccagttttacatatagataagaggctgacaagaactggtttgtaagtttaatgaaatatttatttaatctaaatttcaacatttaaattggcttcctcattgcctctataaagctagttaaaaatatactagaaggcagcttcacattttgcaaatacatccatacaagtcttataagacctgctttgtctctttaaaaatattattttatctacatattatatctaggtattatctacaaagaggcagactgttggccacaaagacttgctggcagtcactgcatgctatgctgctctttgtggctgcccttctcaggcagtcaggaaaaagtagaacaaacacaaatgtcatcaacgctaatgcttccagccagatcatttcacgatctgtgagcacaattctgtaacaacagcttcatttcagcctagccattcatttaggttttgtggatgtgaaaaccaaagaataaaaaattgttaaggcaaatcacagcacattggaaaactctgatatgcttattttcttcaatgtaaatttaaaaaatgggcatcagaacctcctctggatttcactgattgttcttaagaaaaacaacaaatttttggtaagcatttgaaactatgataatgaggactgcatgaagaacaaaaggaaatcctttgagaattttagatattttcagtagttgggtgtatgtgtgtgtgtgtgcacatgtctgtacaaagaaagactaacaagtttctggggagaggtgggagacggtgttagaagagagacggctttaggactgtatctcattatatggcttattatattcattattttaaggatacattgttgaggccataaggtgattcatcttgagacaggctgataaagtctctctaataagatcctggctccattaaaaaaaaaaaaagctaccactgacatttactacgttccaggaattttgctaagagcttttttatgccttcttatttaatgctcatactatacctctgagttaggaattattgtcaaccttattttacagacgaggaagcagccagagaggctaagtaacttgctcagaagcacatagcagggctggaatttaaactcgggtctgtatcattcaggagttcaggggtatggggtagtatttaatatcctatgagatgatggccgtctattttatttaaaaaccaattggggccgggcgccgtggctcatgcctgtaatcccagcactttgggaggctgaggcgggcggatcacgaggtcaggagatcgagaccatcctggctaacacggtgaaaccctatctctagtaaaaatacaaaaaattagccgggcgtggtggcgggtacctatagtcccagctactcgggaggctgaagcaagaaaatggcatgaacctgggaggcagagtttgcagtgagctgagatcgcgccactgcactccagccagcctgggcgacagagcgagactccgtctcaaaaaaaaaaaaaaaaaaaaaaattgcttaagtggctttttaaattgtttgctataatcaatatatatatgtcaatgttgggactgataatgaagagtactgcaactcaagactctgacactgcaagttctattgcctcccaaaattgttataccagattctactgttcaaacagaatcatccaacaagaatatcagctcttttcatgagacctaggcaatgtaatagctgcgtgtttgtcaagtatccagaagtacttaatcaagggctttgctcaaatggacatcctggcaattaccaagggttcacagtgtatgtgtgtgtgtgtacattcacacgtgtgcacgcagattttctcctaaggctgatgcaacaaggtatgctgttagtaaaagagcaaatttagcgtgcattcaatttacaaaatgagatcggacatttttcactaaaaattctcattagagactgaatgaagaggaccttcaatgaccaaaatctatctacctgtaaagaaacaaaacaatctgcactcaatacatttaacaggacagttttccaggtctttgataatgaactgtccctaaaattgttttcttctatgtgattaagaattattttcataaatggtaaagttttaattatttttacattgtcagtaacatgctgtttgctattactgtaaggtgccctttttcaaattaaggaaacaaatttggggtgatgattcacattgtgaaaatagtctatatattttctgcaatggttctttagaaaaaacttgtccagtacacttaaggtctaatattatatttagatttagtactaattgcatgttataaggtatatatattttttactttatttatttattttttttaaatttaaagtctcgctctgtcacccaggctggagtgcagtggtgtgatctcagctcactggccacgtccgcctcccgggttcatgccattctcctgcctcagcctcccgagtagctgggactacaggtgcccgccaccacgcccggctaacttttttttgtatttttagtacagacggggtttcaccatgttagccaggatggtctcgatctcctgaccttgcgatctgcccacctcagcctccctaagtcctgcgattacaggcgtgacccacgatgcctggcctataaggtatattataaatatgaaatctccatcaacatttgctgctttgataaagaaaatcaggtaaagtgctgttgtgttcttaaaaaacatgttatttgtatctagaaatcaaggtgtttgtgtgtaattgtatacttctgaacatgtagaaaaagataaaagaagctgaaagatattcttgcctgaacaggtgtttctgctaagaaatccctgtgaaaaaggatgccatctactgctcaaatttgttgatagagaagaatcttacttctctgaggtaccaaaggaaaaaacatttagagcaatgtgctccttaattttggcagctgccttaaatttaattttctaaacacaaattaagtcttaagcaaaattaaattttatttatatgtagttctctatctttgcctttaacatttaattcaatctgaaatttcatgtaagaataagtagccagtgaagactactttggtgcctgtcaaatctgcatctctgcaggccctcaaaactcctctctgttggtaaactgtaatttttccttatttcactatctatctgcttttttggaaggtggcattctaggtcattacgtcataaacacaagttgaattttgtgcttccattccagagggaacaatatacctcacagttaaaaaacatttctaaaaaattcctaccaaaagtcatcacttaagaacttagtctcctggtgcctccatttcctcatttgaaaaagtcataaacataataatatgatatacagtacatgctctttatgtatccacttttgttatataatgtaccattttatattaagaagaggaactggaaaataaaaattagaagaatgttattgccacacattttccttgtgaagaactgcctcttcaataatacactgtggctccccttcgtccgggagtgttcactcgaaggataatattccctagaatgcaaacctggacatgtgcgaaacaagaggccctttacctgcaaatgttatgtaaatcattaccattttgttttgccacctatacaatggagttgttgtcttttccaacaattggcagtttacatgctttgcagcataaaaaatataaagaataatttacacagatatattattttaatgacatagtaactcctagtatttactttttaaagtaaaattataatgaaaatatttatgactacatcaaaaaaaattcaccactcaagaacatacaaaagataactctctctcttgcacacacgttatgtatgtgtatatatacctcccagaacgcccttgctggctcaggggactcttaccttcgttttctgtgttggctggcacagagtcagccccaaaagaatgccacggctggagatcgtccaggctgaactctccattcacgggaaggagctccacggtggttttcgtttcggtcaaagatggcatgagagcatcgtttccgtaactgatccttggttcactaatcatgttggccaagacgtcatctgaatagttttgctctttctgaagcagctcatctaaaccaaacaaaaccatctctttggtgagtaacaacaatcacaacagcagcagcagcagcagccaccatttacttctgccaggcaagacttcaactgctttcacgtgcatgatcgcgtttagagccatgacataggtaccattatcatctcccttttacagatgtgaaaactgaggcacatggcattcaagctacttatgcaaagtcgcagctcacaagagctgctggcaggactgcaggcaggagcatggcagccggccaatgtgctgcagcgtggcactgctagaggtgaaaggccacaggggctcagctgccatttcctcctgacacagttagacgtccctagtatacaatgatcgcacaggaataaacgccaggctttggtgtggcggcagtaagtgaggcacaatctcattcaagctgaaagacaacagacaatctcctgtcttgccttgcacacttgcaaggataagaaaagcattaaagggccagtagtttgctaccttcttgaatagttttcactgtcttgccttgaaaaaaaatctgcatttcctaaatgctcctcttgtgctgcatgacctatgctctgaggcaacaaggaaactgttcccttgcccttccagatgtagccctgcagacagacatccagccttctctggacttaaccacccctggctccccgtatttcccaatgtgagcagacaccaaatatcctgcctttctcctctgttgcttccctttccaaagaatgctgtcagtgccgcctacccccccactttaaaaattgattaaacaagaatcagctttatggaacatcattgacttatcttttcttactggaaaaagagagcttagaatataatcttgtatcatgtgtaattactgctttaaaaactgaccccaggatatgaagatttgtgagtcttctcttatgtcaccaaagattcaccatgtttttctctgatttttacaaattagagaccgacagacagcactgcactattaacaataatatttgattaaccaaaatgtctcattttccaatcatagctgtgtcaagagtttgctgtagtatatatttcagacacatcactggttagttttattgctagagaaaatgaaaataagatcaggatttaaatttgatttgtaacattttacaatcatctttcaaattctcttttctattgacaaaaaatgtatctgaaaaattaaaattctgttcaaatatacccattaaaataatttgatggaatagcattaaagcttgtgattaatatcttttcatgtagtcagttttattgcaagtgattttaaatgatggaagtcccaagcaaattagtccttttgaagtctaatctgagttataatatatccctattcactgtggcaccgtttctaaaattcaatacttgatgcccatgatgacctttcccttacagataaaagaccctcattagatttcctccaactttttcatgttttacaaagccataggtagcggctaataacttagccaatgtctgattaaataaattaaatgagcatttcttttatataaatcttttgcttgtgactgttaagcacttactatgctaaagagaggatattctggaatactaataattattggtgcatacacattcatcttgacaggaaataacctttgccagcgagaaagctcttgaactccccaggggctacgctgttcttgggtctgtggtatctactatcacttaccatgtcctttatttggaaatgttctcactgtttcgcatacacagtacttatcttcttccctgtgacatctctgaataactctttttactctttttttctcctctcttcatccctgtcattttcttcttgtatctctttccatctctttctacaattctcccctttggaaatcccatcgactcttgaaactctaaagatctcctacctttgggtgaatctgaaatgtacttccccagctttgacttctccctcccactcaaatttgtatatttccaacagtttgctggagataccaacttagggctccctcctgatccatgcacttggtaggtacacaactgtactcaaggtccctggctttcccttccacctttcctgttttctaatcatggcagaaccattctccctcccagtcacaggcttgaatccttcagagccatccaggactccctgtatttcttcgtgtccagtactcacactaccgacaaatccttttgcattctatttctgaattctctcagccatttcctgcttgcttttccacaccaccctcaccgcccctaggaatatgattacttttcgcctggataattacgatagtctcctcactgcttgctatggtctgaatgtcccccaaagtcatgtgttgaaacttaaatctccactgtggtagtagtgagagatggggtcttctggaaatcaagtcatgacagttccaccccgtgcccccgaatggactactgccttctaaaagggctagaggaaaccagcacaggcccctttatgtgcatctgccatgtgagaacagtttttgctgcctctggaggatgcagccacaaggcgccttttttttttttttttttttttgagacggagtcttgctctgtcgcccaggctggagtgcagtggcgcaatctcggctcactgcaagctccgcctcccgggttgacgccattctcctgcctcagcctcccgagtagctgggactacaggcgcccgccaccacgcccggctaattttttgtagttttagtagagacggggtttcaccgtgttagccaggatggtctccatctcctgacttcgtgatccgcccgcctcggcttcccaaagtgctgggattacaggcgtgagccactgcacccggcttgatcctgggcttctcagcctccagaattgtagtatttctattgtttgtttataaattacccagtctctggtatcatgataacagcacaaaccgactgagacaatggtctccctgctggtttttattttacgtttggttcctgaaatcttagttcctgacacacaagaatggctccctctttgtttcagtgggtcttcattttctaccgaattaattccaactcctttgccagatgctgaaggccctctgtggtctgggcccaccccgtatttctagccatggaactcacagctccagctgtctacaccacacctctctctcaggctaaatagcttggggtattcccacaaaagaccatgcatacccattctgacacttttgttttctattcctgctatcttggaagcccatctctgctcatctacgttatttgaactctttagagcccagctcaaatgccctctcctgtatgactctcctctcccaaggcaggcattattaatctgatgggacaaggagactgaggctgggagaaaggaaccaatctcttcaagacccaatggccagtaagcaccagtgctgaaatccaagtcctgggcttcataacaccagccttcccatgttcagcccctatctatttcagcctctcgtattatcacaaaagtagctgtagaaattaggcattattaagcatgtctgttccaatatctttagcagtctcttccacccttgtggatttgtaagctgacttaatcaccgttagtcctatggaatggttattgcttttggtcatcaaataagcatttctcaggcaggggcagctggaaagggccctgtgcccatcttagcccttggcagtaaaaaggcagaggagcaaaagatcacagtgagaaatcttacacttgtacttcacagaacagtcaggggaggttgaggtacgctgtagtacccttttctcttttctctgttacactgttggtagaaaagttcctccaaatggccaccagcatgctgagccccatggtggttaattatattcattttcagaaaatgtaagtgaaaaagtgacagattcaagaaaaggtacatttttagcagagtgaaacacacttagccttcgttttttttttttggtcgttgttcaaaataggaagaaatccacattcctatcttaattcaacacagaaaatttagaaataaccacccctggctatgtcattcagaacaacgaacctctgcctcctgggttcaagcgattctcctgcctcagtcccgagtactgtgattacaggcacacactaccatgaccggatagtttttatgtttttagtagagacagagtttctccatgttggccaggctggtctcaaactcctgacctcaggcgatctgcctgccttggcctcccaaagtgctgggatgaggcgggagccactgcgcctggccgtcagtgtagttttaagagaaaaaaagaggtagacatgatggattaccattatcagaagtggaattcaatttcgtcatcataaaatgtctaaggcagccagctacctgtagacatgactaagggctcaggattttaccagtggcttacacactggcactgggcaattgagcctatgacaaaatacccagagacaaatatgattctttcattgttcattctgagtgggactttctttgacttccatggtgagactaatcacaccgaaaccacacttccactacattagtggccctgatggattatccttttatctgaattaatttaatacttaattacaacactctgatggcctgcaatggggattttcagaacttttaagcatctatatttgccaaccgctatattaaactaagagactgcttattttcctcccaagacttattttttccccttctaaaagctatttgttatgacccaaaattgtagcgtttatctttgaagtcaaatatcttctataatatccaagcatttgaaccttgtagttaacagtggaaatatttaactgagtttagtggtgataatatttaaaatatggcttcatcaataacagaggtatttaatttcaaataccaaacacctaatgaaccccatcaccttgctcttttacaaatgcttcgaggtggccaggcgtggtggctcacgtctgtaatctagcactttgggaggccgaggtgggtggatcacgaggtcaggagttcaagagcagcctggctaacttggtgaaaccccgtctctactaaaaatacaaaaattagccgtgcatggtggcggacgcctgtaatcccacctacttgggaggctaaggcgggagaattgcttaaacctgggagacagaggttgcagtgagctgagatcatgccactgcactccagcctaggcaaccgagtaagactctgtctccaaaaaaaaaaaaaaaaaaaatgctttgaggatgtatacgaggcatacttagagtaacagagggaagaagccctaccacttagttatcattgtaaacactttaaagaaaacaacatcaaaagataataatttcatcttcaaacagctaaatattttgttttttcttagatattcatgatcattcattttgagaaaaatagccttataaataaaagaactgctgaataggaagcagatgaattcatccaatattcttttaattattaatccactagccaaatgtcttctaagaatttaacggtcacatcttacgattaaagaaaataaaatttatgggcattaaatcaatcagttatgtgttacaagtgtcagttataattactgaacagcttcttccatccactgaacacaagtgggttggagaagaacattttcttcatataaaggaggtgccactcagccttttccctgtaaagtctggctgttaaagctctgatctgaatctatccatctgacaaaggtctaatatccagaatctacaaggaacttaaacaaatttaccagaaaaaaaagaaaaacaaccccatcaaaaagtgggcaaaggatatgaacagacacttctcaaaacaagacatgtatgtggccaacaaacatatgaaaaaaaaaaaaaaagctcatcatcactggtcattagagaaatgcaaatcaaaaccacaatgagataccatctcacaccagttgggatggtgatcattaaaaagtctggcaacaacagatgctggcgaggatgcggagaaataggcacgcttttacactgttggtgagagtgttagttcaaccgttgtggaagacagtgaggagattctgcaaggatatagaactagaaataccatttgacccagcaatcccattactgggaatatacccaaaggattataaatcattctactgtaaagacacatgcacacatatgtttactgtagcactatttacaatagcaaagacttggaaccaaccaaaatgtccatcaacgatagactggataaagaaaatgtggcacatatacaccatggaatactatgcagccataaaaaaggatgagttcgggaggtgggagccaagatggccgaataggaacagctccggtctacagctcccagcgtgagcgacgcagaagacgggtgatttccgcatttccatctgagataccgggttcatctcactagggagtgccagacagtgggcgcaggccagtgggtgcgtgcaccgtgcgcgagccgaagcagggcgaggcattgcctcacctgggaagcgcaaggggtcagggagttccctttctgagtcaaagaaaggggtgacagacgcacctggaaaatcgggtcactcccacccgaatattgcgcttttcagaccggcttaagaaacggcgcaccacgagactatatcccacacctggctcggagggtcctacgcccacggaatcgcgctgattgctagcacagcagtctgagatcaaactgcaaggcggcagcgaggctgggggaggggagcccgccattgcccaggcttgcttaggtaaacaaagcagccgggaagctcgaactgggtggagcccaccacagctcaaggaggcctgcttgcctctgtaggctccacctctgggggcagggcacagacaaacaaaaagacagcagtaacctctgcagacttaaatgtccctgtctgacagctttgaagagagcagtggttctcccagcacgcagctggagatctgagaacggcagactgcctcctcaagtggtccctgacccctgacccccgagcagcctaactgggaggcacccccagcaggggcacactgacacctcacactgcagggtattccaacagacctgcagctgagggtcctgtctgttagaaggaaaactaacaaacagaaaggacatccacaccgaaaacccatctgtacatcaccatcatcaaagaccaaaagtagataaaaccacaaagatggggaaaaaacagaacagaaaaactggaaactctaaaacgcagagtgcctctcctcctccaaagaacgcagttcctcaccagcaacggaacaaagctggatggagaatgattttgacgagctgagagaagaaggcttcagacgatcaaattactctgagctacgggaggacattcaaaccaaaggcaaagaagttgaaaactttgaaaaaaatttagaagaatgtataactagaataaccaatacagagaagtgcttaaaggagctgatggagctgaaaaccaaggctcgagaactacgtgaagaatgcagaagcctcaggagccgatgcgatcaactggaagaaagggtatcagcaatggaagatgaaatgaatgaaatgaagcgagaagggaagtttagagaaaaacgaataaaaagaaatgagcaaagcctccaagaaatatgggactatgtgaaaagaccaaatctacgtctgattggtgtacctgaaagtgatgcggagaatggaaccaagttggaaaacactctgcaggatattatccaggagaacttccccaatctagcaaggcaggccaacgttcagattcaggaaatacagagaacgccacaaagatactcctcgagaagagcaactccaagacacgtaattgtcagattcaccaaagttgaaatgaaggaaaaaatgttaagggcagccagagagaaaggtcgggttaccctcaaagggaagcccatcagactaacagcggatctctcggcagaaaccctacaagccagaagagagtgggggccaatattcaacattcttaaagaaaagaattttcaacccagaatttcatatccagccaaactaagcttcataagtgaaggagaaataaaatactttacagacaagcaaatgctgagagattttgtcaccaccaggcctgccctaaaagagctcctgaaggaagcactaaacatgcaaaggaacaaccggtaccagccgctgcaaaatcatgccaaaatgtaaagaccatcaagactaggaagaaactgcatcaactaatgagcaaaatcaccagctaacatcataatgacaggatcaaattcacacataacagtattaactttaaatgtaaatggactaaattctgcaattaaaagacacagactggcaagttggataaagagtcaagacccatcagtgtgctgtattcaggaaacccatctcatgtgcagagacacacacaggctcaaaataaaaggatggaggaagatctaccaagcaaatggaaaacaaaaaaaggcaggggttgcaatcctagtctctgataaaacagacgttaaaccaacaaagatcaaaagagacaaagaaggccattacataatggtaaagggatcaattcaacaagaggagctaactatcctaaacatatatgcacccaatacaggagcacccagattcataaagcaagtcctgagtgacctacaaagagacttagactcccacacattaataatgggagactttaacaccccactgtcaacattagacagatcaacgagacagaaagtcaacaaggatacccaggaattgaactcagctctgcaccaagcggacctaatagacatctacagaactctccaccccaaatcaacagaatatacatttttttcagcaccacaccacacctattccaaaattgaccacatagttggaagtaaaactctcctcagcaaatgtaaaagaacagaaattataacaaactatctctccgaccacagtgcaatcaaactagaactcaggattaataatctcactcaaagccgctcaactacatggaaactgaacaacctgctcctgaatgactactgggtacataacgaaatgaaggcagaaataaagatgttctttgaaaccaacgagaacaaagacacaacataccagaatctctgggacgcattcaaagcagtgtgtagagggaaatttatagcactaaatgcccacaagagaaagcaggaaagatccaaaattgacaccctaacatcacaattaaaagaactagaaaagcaagagcaaacacattcaaaagctagcagaaggcaagaaataactaaaatcagagcagaactgaaggaaatagagacacaaaaaacccttcaaaaaaatcaatgaatccaggagctggttttttgaaaggatcaacaaaattgatagaccgctagcaagactaataaagaaaaagaggagaatcaaatagacacgataaaaaatgataaaggggatatcaccaccgatcccacagaaatacaaactaccatcagagaatactacaaaaacctctacacaaataaactagaaaatctagaagaaatggatacattcctcgacacatacactctcccaagactaaaccaggaagaagttgaatctctgaatagaccaataacaggagctgaaattgtggcaataatcaatagtttaccaaccaaaaagagtccaggaccagatggttcacagccgaattctaccagaggtacaaggaggaactggtaccattccttctgaaactattccaatcaatagaaaaagagggaatcctccctaactcattttatgaggccagcatcattctgataccaaagccgggcagagacacaaccaaaaaaagagaattttagaccaatatccttgatgaacattgatgcaaaaatcctcaataaaatactggcaaaccgaatccagcagcacatcaaaaagcttatccaccatgatcaagtgggcttcatccctgggatgcaaggcttggttcaatatacgcaaatcaataaaggtaatccagcatataaacagagccaaagacaaaaaccacatgattatctcaatagatgcagaaaaagcctttgacaaaattcaacaacccttcatgctaaaaactctcaataaattaggtattgatgggacgtatttcaaaataataagagctatctatgacaaacccacagccaatatcatactgaatgggcaaaaactggaagcattccctttgaaaactggcacaagacagggatgccctctctcaccgctcctattcaacatagtgttggaagttctggccagggcaatcaggcaggagaaggaaataaaaggtattcaattaggaaaagaggaagtcaaattgtccctgtttgcagacgacatgattgtttatctagaaaaccccattgtctcagcccaaaatctccttaagctgatacgcaacttcagcaaagtctcaggatacaaaatcaatgtacaaaaatcacaagcattcttatacaccaacaacagacaaacagagagccaaatcatgagtgaactcccattcacaattgcttcaaagagaataaaatacctaggaatccaacttacaagggatgtgaaggacctcttaaaggagaactacaaaccaactgctcaaggaaataaaagaggacacaaacaaatggaagaacattccatgctcatgggtaggaagaatcaatatcgtgaaaatggccatactgcccaaggtaatttacagattcaatgccatccccatcaagctaccaatgactttcttcacagaattggaaaaaactactttaaagttcatatggaaccaaaaaagagcccgcatcgccaagtcaatcctaagccaaaagaacgaagctggaggcatcacactacctgacttcaaactatactacaaggctacagtaaccgaaacagcatggtactggtaccaaaacagagatatagatcaatggaacagaacagagccctcagaaataacgccgcatacctacaactatctgatctttgacaaacctgagaaaaacaagcaatggggaaaggattccctatttaataaatggtgctgggaaaactggctagccatatgtagaaagctgaaactggatcccttccttacaccttatacaaaaatcaattcaagatggattaaagatttaaacgttagacctaaaaccataaaaaccctagaagaaaacctaggcattaccattcaggacataggcgtgggcaaggacttcacgtccaaaacaccaaaagcaatggcaacaaaagccaaaatggacaaatgggatctaattaaactaaagagcttctgcacagcaaaagaaactaccatcagagtgaacaggcaacctacaacatgggagaaaattttcgcaacctactcatctgacaaagggctaatatccagaatctacaatgaactcaaacaaatttacaagaaaaaaacaaacaaccccatcaaaaagtgggcaaaggacatgaacagacacttctcaaaagaagacatttatgcagccaaaaaacacatgaaaaaatgctcaccatcactggccatcagagaaatgcaaatcaaaaccactatgagatatcatctcacaccagttagaatggcgatcattaaaaagtcaggaaacaacaggtgctggagaggatgtggagaaataggaacacttttacactgttggtgggactgtaaactagttcaaccattgtggaagtcagtgtcgcaattcctcagggatctagaactagaaataccatttgacccagccatcccattactgggtatatacccaaaggactataaatcatgctgctataaagacacatgcacacgtatgtttattgcggcattattcacaatagcaaagacttggaaccaacccaaatgtccaacaatgatagactggattaagaaaatgtggcacatatacaccatggaatactatgcagccataaaaaatgatgagttcatgtcctttgtagggacatggatgaaactggaaaccatcattctcagtaaactatcgcaagaacaaaaaaccaaacaccgcatattctcactcataggtgggaattgaacaatggagatcacatggacacaggaaggggaatatcacactctggggactgtggtggggtggggggaggggggagggatagcattgggagatatacctaatgctagatgacgagttagtgggtgcagcgccagcatggcacatgtatacatatgtaactaagctgcacaatgtcacatgtaccctaaaacttaaagtataataaaaaaaaaaaaagatttgaatttgcaaatacaaaaaaaaaaaaaaaaggaaaaaaaaaaaggttgagttcatgtcctttgcagggccatggatgaagctggaggccatcatcctcagcaaactaacataggaccagaaacccaaacactcatgttctcactcataagtgggagctgaacaatgagaacacatggacacagggagggggacatcatacaccagggcctgtccaggggtggggtgaaaggggagggagagcattaggacaaatacctaatgcatgcggagttaaaacctagatgacgggttgatgggtgcagcaaaccaccaaggcacatgtatacctatgtaacaaacctgcatgctcagcacatgtatcccagaacttaaagtaaacaaagaaaaaaaaaaaaagctctgatttggacaccagtgagaatatgaagtccctcggcttgctggattttcttctgtctaggatcgaacctccactgctattactattttctttcctttttgattcttttggatcccatggaaaaatatttatctgcaacttctccacaaaatggaaatttgtttttaatcttatctaacaggagattcgcatatgaccaattcttatcttttaaataaaaatttacttatgtgcctgcctgaaaggactgaagatcatacctctacgctctcttccatgtcctttcttctctctcccctgacacagctgcattggaagtagctgtaaatgggatggactaattttccctacccaggaggcccactgtaaatcaagcggtcacccacttccagctaggcattttgccacaccagggctatgagaaacagatttaattttccaatcagcagttctgtgcatgtctgattcttggctcaacatacaactgctatgctgtttattatacttcatctctccatggcctctgaaactccccaaggctcgggttcgtcatccgcaaaatcgtgggaggctggttccatggttcttgcagtcccttcgctttgaatccttttgtctgtactcttgctacatgggtgttctctgggagtttgttagacatgcagaacctcaggtcccacccagatccagggaatcagaatctgcatgttaatgtgatccccaggtgactctcatgcatgttaccatctgagaagacctaccctccaccacactgaccacagccacgagctgtaccaagacaccaccacacaacagcctcggttatcccttcatgaaagaaaaacaaacataatggctgggcgtggtggctcacgcctgtaaccccagcactttgggaggccgaggtgggtggttcacttgaggtcaggagttcaagaccagcctggccaacatggtgaaacccgtctctactaaaaaaatacaaaaattagccaggcacggtggtgtgtgcctgtaatccccattattcaggaggctgaggcaggagaattgcttgaacccgggaggtggaggctgcagtgagccgagattgtgccaactgcacgccatcctgggcaacagagcaaggctctgtctcacaagccaaaaccaaaaacaaacaacaaacaaaaaaacaattctcaaaaacaaagcaaacaaagcaaggcatgagatgagtgtgagccaagaaacaatactgccaggggaatattgccaaaacaccagagtcatgccttgaagtttcttatcatcagggtcacatttctgaaccagaaagccacaggaaaggaaagactggtcacagacttccttcttccctggaccatttgttacgggaagttctcaggaaacaggtcagtaagtgtagagggcatcacaggacaaacttcattgctgggtttcccagaaaagagcagctctcccctactgaagacacttttagcagacgggccttcactagtgagtaaatatactaaagaagcatggacttacttgtaggtcggtggagcagctgatttgggagagaacccatgagatctttaaggacggtagggatgttctgattagcatatatgctacagccatctgcgatgccaaagccatactgtgatgggactatgccagttatgacaccttcataaccatgagaactgcactcatggccttttcatacccatctgctgatttgataaccacaataatcttccttagtgggatcactactcccactgacagttgaacaaactgacatccatcctgagaagtatacttaaaactagcaagtggcagaactgaaatctgaacccaagtatcccaattcctaatgcaaccttctcactgttccatgaaaagttccattttatagaggacatggctatattacttggattagaaactaatattaaagaagcatatcacgcctgtaatcccagcactttggaatcatgaggtcaggagatcgagagcatcctggctaacatggtgaaaccccatctttactgaaaatacaaaaaaaattagccagatgtggtggtggcactgtagtcccagctactcgggaggctgaggcaggagaatggtgtgaaccccggaggcggagcttgcagtgagccgagatcgcgccactgcactccagtctgggcaacagagtgagactccgtctcaaaaaaaaaaaaaaaaaaaaaaaaaaggaagcataaacccatctatcatcacaagcaccctctttttcatacatttcaaatttttgataggtttgaaaaagaatgaattcgacggtatcttttagaagccaggataaaagagattaaagcagtagtccaaggtcacggagattcctgatggtggagcagggctgaaaagctccctcttctagctaagtgaggcctgcctgtcactttgcttggacagcccattctcaatagcactttcctcccagaacactctcccaagtctttaggtttccctttctcaggatgaatacgatggctacgtgaatggccagaagtttcaccaactctaagtcaaattgtagtgtagcgacctaggcacttcaatggtcaagagagatacagccctgtatgacgcggccacattttccaacttggggaagaatttatacacatattatcacaaagtaaatgctgtaccataaatccagtttttatcttgacctccagaaaattaggtcagttatttttagctacactatcaatcttgaaaatctcccagagttaaaactcagactacatgtctaaatcggggtttatttttgtttaaaaataacagtttcctggccacacatgtttaaatgaagcatgctttgtccccttatggtaacaaactgccctggaagggacacaaacaaagcttcacatcatttgtgaaaatattccttattgctagggacattttcctgaaatatcacttgtctggcttagactgagggtacagaagaagtcccttttcctttaaaacacatttccttttggctttcaaacatcatagatcaaagaacttagacctaccagtggcatcagtcagtaatcaagataaagaccagccaggctccctggcatctaaaagcagattgtagggctcctttttcccgtttacctgtagaacttgtgccaatgtgctgatctgatttccaactacattagggagtcttggtcctgcctgggttgtcaggaacttaaagtagagactaaaaaacaactttatggccaggcgcggtggctcacgcctgtaatcccagcattttgggaggctgaggtgggcggttcacgaggtcaggagatcgacaccatcctggctaacgaggtgaaatcgcgtctctactaaaaatacaaaaattagccgggcatggtgcaggcgcctgtagtcccagctactcaggaggctgaggcaggagaatggtgtgaacctgggaggcggagcttgcagcgagccaagattgtgccactgcactccagcctgggcgacagagcgagactccatctcaaaacaaacaaacaaacaaacaaacaaacaaaaaaaccaagtttatatactacagaaataatctctgaaagatgctgtattaagattacaacacacacacacaaacacacacacacatatcttcttgttttgaggaaacgtacagtgaagtatttaggtgtaaagggccattatgtctgcaacttcctttaaaaatttttaaatatatttttagaacttttctaagtctccaattatactaaaacaaaaagtttagtactgtaggcattgtcagctttaatttatacatatttggatgtcttcctctggttcgatttatagtgaaattacatcatatgcccattaatgtgatacaaactgcatgtcttctacaaacaaaaataaaaatagaagtgaatgtaattttgatgccttttttttttttttaactggagacagagtcttgctctgtcaccaggttggactgcagaggcgtaatctcggctcatggcaacctcggcctcctgagtagctgggattacaggcgcgcatcactacgcccggctagtttttgtatttttagtagagacagggtttcaccatgttggccgggatggtctcgatcttctaaccttgtgatccacccgcctcggcctcccaaagtgctgggattacaggcatgagccactgcacccggcctgatccctcatatcttttaaacataagtcaattatttcatatggtctttaagccaagaaacagctatctcttcactcttcacatgctggaggaaaaactggctgcctggctggttgagagatgtgtactttgatggctgacctgaagacatttcaaggtgattgttacgtgaaattctctcttcaaatctgacttgaagagtctaacctctgcagcatatgttatgacttcactgtgagtcttcttttattaataaaatataatgtttttactaattataagagtaacataaatttcatgccaaaaatgtagaaaaaaggaatgagaattcatttacaattctaacagcagaaataatcaagagtagtggtttttttttaatggttttattcttacagcattattttcgtctctttatcactttactatgcaatttttatgactatgcttaaggagagtaaatttttcgaagttattgaggcaatggagagtctttggaatgaggataattaggcctgaggacacagaggaatcatgaggaagaattctccagtttcattcctttttctgggtacagtttgtttctccttctaagtaagttcctagatatagaatgaattggaaaaaatgaaacgtgaggtttgctacgtctataacagtatcacatttcattttttaaaactgccaatgctttcagtgaggaccagaaagtacagtgagaaaaaaaaattcctcaaatattagttttcatgctcttgcacgcatttttataaaggcaaaagtcattctggtgcctgtatacaatctaaaggcataatctcctggagccttcagtgctggttttggggttttctggagatcaatccacagtgtcccattttttctgctggagctctgaacccactaagagagagcaagaagagatgtaaacctctcctttgcttctgataaagccaagcccttactagtccacatgatgctttctctggggagtgagtcacatacaggagacatggcttgtccagctgcgtgctggactgaatttcagctccaacctgaaccttccaacaggacaagggagggaggagaatgggccgtagcaagacttgcccacagcattgccataacagctgtgcaggctgtgggtacaactctaagagcagcactcattttgtagtttcagtgagtcgtgtccctaaagccgtgtcctgtgtgaccagccccgtctctcaagctcatgagagaagtctatctgaccgggataagaaggatcctggggcgggcccaagcaaatgaatgaattgggaaacagtgccgctcccggcagccagcaaaaactccgccatgctgtgaagaaagtgcattctaattgattcatgttgatacatgctgaattgatggaattttatacttcaaaggatgcaaagaattggttagcaagtctgatgagctcatggtagaaaggatgattttcaacatccatacatagtgaatttcattcaaagagcctaaaaagacttatgcagataattataaggggatcaggcaagtgtgtaatagcacaaattatatatatatatatatgtaaaatcacaacacaggattgggtccttttcccacagacagcacatcatccttgtatatatgatagctcatttgaaatgtttatttatgcagattttaaaaagcacacaaaccctgtaagcacttctgcacagtggcctactcgtgttttctttaacacaaaacttgctttctggtgaacaattctagatatagcaatggttctttctcctctgctttagcttattcacaagcttctttaacttctttaacaacgtgtggggaaaccaagcctggcaacagaaagcacttcacatggggggcttggaaatgaatggaaagcgtctgtcttcaggagagcattcacgatgcacaggagtgagagaagctgaaaagagtcactttaaaagaaataatctgcaaccaagaaaatcaaaccactttatcataaactagtgagcccctccctccctgcctgccttcctttttccaggggagtgctagaaataacttcatcaatttcttttcacttgaagggctcatggttcagaagaaaagatgggcataaaaataattactattacaagtgttatggtagggataccgacagaatgacaaagaaacaagcctgggctttagggatgtgactagtgatattacagtggggccccagggaaagagatcattgtcctagcagatacaagtgcatgtaccgaggcacagaggacaagctgcccaggatctgtgactcttctggctgctgtggtacaagggaagtgaaaagggaagcagcttagccaagaggctttcagtttgtgggatacagagggcagaggaatacactgacctataccatgagtatgcaattagcaaaatcccagcctatgggaattctacgggtcaagtgacctgcgcttcatgaacaggtaaactgtaaaaaaaggatggaggagaagcctggagattataaaagactaaccagacaaagtcagcagtaaaaaatggccaaaagcatagccgataaggatgcacacaagagtgatacagccagaaagatatttcaggaactggcccaaggaaaaacagtgggcattttggtggcggtatttgggatagggcgagatgctatcggggtggaggataaacttctaattcttgacctgagtttaatctacgaaaagagaaaatatgggggagaaaggttctgtttacacatgttgagttgcaatctttcagaatattgggtggagccaatggaaacatggacccagagagctcacttctatgctgaaacagcccacagggaagcatcagaatgaaaatggaaacgttcccaatactagcagaactccacaggcgctttgaaaaaaacatccacattagattccccaaaagggatttatctggtaataaattctgctagacaatgaacagttccacccatgataaaataacatgttgttgctgcaaattctttgtattgtctaattgcagtgcttaacgtaataaaatcaggctggtgttattgttaagaactagagagtgaagcattttttatccaaataaagtgcaatgggttttaaatcaaatcattttagaataagaatcctatgagataataataaaatgcaacttcatcttttcctgccgagaacaaagaagaaaatagtgtaggagatgaaaagtaaagtagacccaacctttttgctaatttgtttttagatacgtactccatgcagacaatggtgaagtgaagtgaagtgaaggggtgtcatcttattcacctagagaaccacaaatcttggtgctggaaagtacgatccattcgacatgatggactatttcccacccggccactcactcgagaatggataacctgttttcccgcctggggtaactgctttccatggatgtacagcttcaggcctcatacgagaggatctcacaacaatctcttcaaactttttctaatccccacactttccagtcttggcacaagacctcatccaggcttctgagtctttgttgaaaatttacacaaaattctagaaatgtattttctttaagatagttactttaaaaatgttattttcatctcagcacagttagcctttccttatctgttcttaaaatgtttcaacttgaaactaaaaaagaaaaaaaaaaacacatttcatctcaaattatgatatactaaataattattgacttggccccaaacatttctactcttttcttcttacacaatcagatttaaaaatgtaactaccttttctaaacatacaatattaaagcatactcaacttcagtaacaggtaatgaatgtacctcaaaagtcagagcctctacgttaagtaccatagtgctccaacatcgttttttacatttttaaaattttattttttattgatacataatagatgtgcatattttcagattatatgagaaaacttaatatattcatataatttggaaagatcaaatcagtataatgggatatccatcacttaaatgtttttcttttctttttgctttgaggaagggtctctctctgtcactcaggctggagtgcagtgatgtgatcatagctcacttgaaccttgaactgctgggctcaagtgatcttctcacctcagcctccagagcagctgggtctacaggcatgcaccatcacacctggctaatttttaaatatttgttttgtagagatggggtctcactatgatgccctggctagtcttgaattgctggggtcaagtgattttcccacctcggccttcccaagtgctgggactataggtgtaagccatcgtgcccagcctgtcttctttacgctagaaactttcaaattaggttctcctagctatttttaaatatacagtagattactgtaaattagtcaccttgctgataattaaatactaggtcttgcttcttctatcaaactgtgtatttgtatccattaatgaacctccctttgtaagtatgatgtaagcaatccttacttggctacactataagcttcaacaacaaattaaaaaatgattcacattatagagcatttatacatgccttttcatcttccaagtgtggtaaacattaattaaccctggctaattaaaacagccacagttgacacatttactcattaatcagcctcaagcaaatgcaaagcattaaactctttcacgttttggtaccaattaaatgttattattttttttttaatgaagaggtcataaatttaagacatgtagttcttagatttaaatttgatagtggttgaaaaaatttgacaatagttcacattcttaaaagtcaaggaaaataaaaacataaccgcattatgggttgaattttcccccaaaatatatgttgaagtcctaatgcctacacctaagaatacagccttacttggaaacagggtctttgcagatataagattgaggtcacaatggagaagggtgggcccttaatcatattagagaagacacagaaacagagacatggggagtaacaccatgtgaagacagaggtggagattggaggggtgcatgtaccaaccaaaggaatatcaagggctggcagcagcactagagcaagcgaaaggcatgaaacagattctcccctagagctgtaagaggcagtgtggccctggcaacaccttgctttaggacttctaacctctagaataatgagataatgagagtatatttctgttggtttcggccatgcggtttgtggtaactggttccagcagccctaggaatctaatacactgcccatgtaagtgaatattagctatttgctgataagacaagaatttctggttataataaatatactggaatagaatgtggtttctttttttttgagatggagtctcgctccagtcaccaggctggaatgcagtagcgtgatctcggctcactgtaacctcttcctcccaggttcaagcaattctcctgcctcagcctcccgagtagctgagactacaggcgcccgcaaccatccccgactaatttttgtatttttagttgagacggggtttcaccatattggccaggctggtcttgaactcctgaccttgtgatccatctgcctcggtctcccaaagtgttgggattacaggcgtgagccacaacacccggccgaatgtggtttcttagtgagtcctttactcaaggctggaattaaacaaaggagatgaatcacgagctctatgataatagtctaatagtctaatctagccctcttaagtgcagagatgttttccctctgaacacccgtgtgtttcagctctgttcctcttccaatgcccttccacagggaacaaatcctttcttgaccaccaatggctgcatgacttatcctgagaagatcatggggattttggatgccaggtcaacccttacactcagcaaggaagtggaagggcctcagtttcaaacactttgtaaacacagaggttaggtcatttcctctccaataagccagaagctgagctgtccctggcagcaaactgtgtgtcaaatgcctggcgggtttcaggttttactaactccagagtgacgaaacatcaccacctctaatgccagaaagaagtcagctgttgtacctgtgtcacaactaaatttactgaagtcagggcagctgaagtaatctataaaacttagcatgtcaatttcaatttagcgttcacattcaacaaattgtgtatttaaaaaaaaatctccagtagtctaaaagttttcattttattcttgtgtaaaatctggaagactggaatagaatgttttatggtatgagtgtttagtagcaacattaggttaactgtgaccttttggctcaagacatgagaaaatatagctaacaatgcttggttatgggtttgtcacactatactttgttatactatccagcagtatccacctgctttaacagtgtggatacactaaaaactaatttaaaaaaatctgggctgggcgcggtggctcacacctgtaatcccaacactttgcgaggccgaggcgagtggattacaaggtcaggaattcgagaccagcccgatcaacatactgaaaccccgtctctactaaaaatacaaaaattagctgggtgtggtggtgcgcgcctataatcccagctactcaggaggctgaggcaggagaatcatttgaaaccgggaggcggaggctgtagtgagccgagatcgtgccactgcattccagcctgggcaacagagtgagactctgtctcaaaaaaaaaaaaaaaaaaaaaacctgtcaaatccctccatacaagtgtatgcacttcacataccaaggaggtctaggatttgaagttcatcaaggccgagtttaggctgccagaccacaacctcgttttaatgccttaggtgcagaaacaggagaaataataccttccatgcctcccctgactagctttaggataaagaagctgtgcactaaatagacagtagctgaggaacgatgaagaggatctacccaaagtatgaataagccaactgctatggatcgaactgtgtgcccctgaaaattcatgtatcaaagccctaaccctcaagggacctttggagatcagacctttaaagagataattaaggttaaatgaggtcatgggggtgtgactctgatccaataggacaggtgtccttataagaaaaggaggaggccgggtgcggggctcacgcctgtaatcccagaactttgggagggcaaggcaggtggatcacctgaggtcgagagttcgagaccagcctgaccaacatggagaaaccctgtctctactaaaaatacaaaattagccaggcatgcctgtaatctcagctactcgggaggctgaggcacgagaatcgcttgaacccaggaggtggaggttgcagtgagccaagatcgtgccattgcactccagcctgggcaacaagagcgaaactctgtctcaacaaaacaaaagaagaagaggaagagacacctctctttctctctgagaaagaccatgtgaggacatgatgcgtaggtggccatttgtaaatcaaggaagagaggcctcctcagaaaccgacctgctggtaccttgatcttggacttccagcctccagaagcatgagaaaaataatttctgttgttgaaggattcagtctgtggtattttggtattttgttatggcagccctagcagactaatgcatttatctagtcacactcagacaaaagaaagagcacaggtcagaatagctttttctagaggattctgttttctttctttcttcggcttctttttctttttttcctgaaggcaatagctgaatctgagagtaacaaggggctcaccagggatgtgcaaggaatttcttgtactgcccctttcatggaaatgacaaggaagtgatttatttcagatgtgactcagttcaggatttgaaagcacatgtgacaaatggtcaagtaaagaaaaagcttttctttttctttacttgaccatttgccacgcaagttcccaagttcttcctccctatcttgcttcattacaggcagtgggaaaaatccaaacagcttccccctgtgtctgggacatctccagctctgtggtgtatttactttgaaggaacaaaaaaggggatagtatatgacttccatcccaagtcactataggatatactttaagaaacaagggagtttaaattgctctgctgtataacctgcaaaattcatctcctactgcagaatagagtgagttgcttctcaggattcgcacctggagttggtattcagcacatgttttctttgtaacatttctgtcaattctctaaaaagaccacactttttgagctggcactaggctctctgacaatcttccaagacgaagcttttacagtccatcatttacaatgctgacaactccaggcacattttgtcaattttccctttcatctcttattaaaataaaataatatcactttggatttgaagagagcctaaatggataattctttaagcagaatgtcagtatcaatgatagaaagggaagaatctaagagggaggtaaatgttctataagtagagaagtaggttcacaatttctgaaacagcaaatcaaacagcaaatgggggaaagttatgaaaggcagaattttgtgactcaagcccatcttatgcttatacagttttttgtttttgtttgttttgagataaggtcgtccctctgtcacccagcctggagtgtagtggtgccgccaggcctcactgcaacctccaactcctgggctcaagtgatcctccaaccacagcctcctgactagctgggattacaggtgtgtacccctaaacccagcttattatttttttgactttttgtagaaacagggtctccccatgttgcccaggctggtcttaaactcctgggctcaaatgatcctcctgcctcagcctcccatagggctaggattacaggtgtgagccaccatgcctggccttttatactgtttattccctttagatacagttaatggacattaataagcagtttatgccaatcccttttcatagctaataagaagtcttatcttggataaataaaacctagccactaatgctgccacacccaaataaactctctatgcatctgaacttcttgaggttaataatgcttcattgtaatattttataaaatcaccactttggaagtgaacaccactagaaattcacatggccagtttatagatggggactgggggaagcagggaggatctctgcaatccagtagttaggctctgccagaatgtatttagagttgtctctaaatacattctgagtctctgcttcattttttttttcaatgaaaatgacaatgtctgtcatcccatgttcaagacaaatataacaagtttctaagaatccttatatttttgttattgcatataagcatgagttttaaaaacctctgaatgtttaaaggatcacctgggggaataagaaaaatgcagatctctgtaggtctgaggtagagcccaagaatctgtatttttaactagaattcctctaaattactgtgcttcacttggccccaattacacattaggagacaatgatttcaggatgacaatcagccttttccatccaaggacttaaagcagctaaaccgaagacaccgacaaataccagatacttttctcagtctactggctgatggcacaaaagtgcagaagtcacgtagggcagtatggaaagctcgagctaggactggagtcagcgagagacgctagcttcccctgttcgtggattccgaagcctcaagcccacattaacaaggccttagacgacagtaaacacccagactcaggctcctacagagggcccccagttctgctctaatatacctatttttctttaaataaaaaacatctgatttttgcaccccaggtatttaaagacacactttgatttctgaaaggcttttgaccacacatgaggaactccttgggccttgaccatttttagcactttcacagtttctgattttgatcaagccacttaatcacccaggattctgaatctgaaaaccaggagggtttaattccactttcatgttcccttgaggagctgttggcagcaggatgaaggcaggtccatacagaacatgggaaggaagccaggaagccagcttttcctttcacatcaaagagatctagaaagcaaaacctgtctcacatttgcatacaatattagacttacatatggatgccatgtctgtcaaaagacaggctaattagggcattagtttctttaatggttgcgatttagtaattcacaaatagtcccacttaatttttcatcctatacctaaaggatctacttcacacttgaagtttaagaaggcttctcccttaagatagaaagaaggcattcaagtatcaaaatactggtttcctgccaaaaaataagggatgagaaaaagcagacacttagcttatcaatcaaaatgctggcagggaaagactactggattaccaagttcattcccctagcctgcactgattcctctttttctctaaagtttcttattttttcagtttttctcatgatactgacattgccaaccagcagtctggaaactgttcaggttgattcttagcagaaaatcgaggggctctcctgttactgttaatatccttaaaacacttaaatttggttagtttgcttcaagcattctcagtatattacaaaaaaaaaaagtactcaagaatttctagactttattttgactgacatcagctaccctaatgaacaggaggggacaacagcaaggtatattaggagcatctccttcctttttaatcagaattatataggaattaagaactctaaggccacagtagagtatagtatcttggaagaagaaagcggagaatgtctgacattttcactgatcgtttaggctgatggcttaaaccatttccacccaagtttcttacaagttagcatttccagccaacattacctactgcaatttctctataatcttaagggtattgagcccccaaatgagagagagaaaagagatgtaaactaaacaggagtcagagaaggggaaactgagtctgttgcacatcatttaccctttaacatgattttaaaggtaataatgcttataaaaatattagtagtagtaagggatatcaggtgacaagcagaagtgcccctctccacagatatgccagtgtatctgtagaaatacggtgctaaaattagaaaagactgaacattttaatttattaggtagacccaaatagtctaaaaggtttcacccatatacttagcaatagtttatgaaagttccttttcacctatccttatcatgacaaggcataacagatttttaaaaaactaccaattggccataatttttaaaaaattacattttcattgggtattaataataagaagttgttcaccttttaatctacaactaattatcagatatgcatgcattttttttctatgaattgcagctgttaaatttttgtgaattaatccaatgcatcaattcctttgggttttcaccttaaacatttttgtggcatacaatttgtataatgtgaatttagaagataatagcataggtgactggggtgctacaatggattctcacctatttattaactttttaatgagttgattagtctctaaatcagtaattcgcaaagtttagcatttatcaatgtcacctggacagcttgataaaatacagattgctcagccccatccctagctttgctgattcaggaggtcaggggtgggatcatggaatgtgcttttccaacaagttcccaggtgatgccaggcgatgctgatgttgctagactaaggaccacacttggagaaccacagctctgaaatattccctgggcatggtatttgcaatacatactttatacctaataatttgtttcaggacacacaaatgcacatgagatttgatacatactctcaaaaagctaacaatcagttaagtggtaattcactgacatgtacacatcaaagtaatgttagacacatgtaataggccaagattggggatgggcattataggcagatggaataacataaataaatgcatccagggctatggatataagatcagcctggctggcaaagtcagactcatgaaggagattaatgggaaaacctatctgttttgtctgtctcaggttattttgaggatcaagtgaaacttagaaacaataacaacaaaaaaagcaaagtctgtgatcaagaagaattactctgttgcaacaatataaactaagaaaaaaatacgcaaaattctctgctgccttgggagatgatctcatgatgtgtatcatttacttttaatatttttatttatttatttttgagacggagtctcgctctgtcgcccaggctggagtgcagtggcgtgatctcggctcactgcaaccttcgcctcccgggctcaagtgattctcctgcttcagcctcctgagtagctgggattataggcatgtgccgccatgcctgcctagttttttatttttagtagagatggggtttcaccatgttggtcaggctgctctcaaactcctgaccttgtgatctgtgcgcctcagcctcccaaagtgctgggattactggtgtgaccgaccgtgcctggccaatgtgtatgatttaatagccagcagcaacaggccactaacatgccatctgctaacaggggctctagctattaacatcaacagagctaaaaactcttatgtctgatcccttgcaaatggcgaagacctggctgagaattattatctcatgctttcagagaaaactttgcttgtcctgcactgaaaaatctggctgcaataatcacatggaagaaggtatgtttgttggcatggttcatgggctggcttatgacttctaagcagaagatacaaaataatataaaattcctgcaacatgcacaatgtagctgatattcatgttctctttaaatatcttaacactgacttacatatttaagggtgtggagtctttgagcttgggaagcatcttattactgaggtacaaatgctaaaagagggacatttcttctatctaccgcattttcaatgaaaagatgctgaaggtgaataaacagctctgcaaacccagttttgtttaacttggcaacagcagtaagtaagtatcactggacacagagacactggaatagattcagtctttagtcttattcatcacgtctgaccttgggcatattacatggttttcctgagcctatgaaatcatgcggctgaacgagctgaaaactaagattctttcctttgctaataaatttcagcaaacgataggagtaagaacggctgtctaacgagactaccaaatgctacgagacgcagcaagcaatgtccctttacctaatggatacagcttcttaactgtttatccaaagtctccccaagcaaattctaaattattctaaattatttgagtaacaaagattgggcccttatacctgtgacgtgtctggcaatgacaaagaatgtggaacatgggaagcatttaatacatatttattgaagatcctgtgtccttatttcttcaatctccttgctattcacaatggcgaatgatatgaatatacatatatatatcctatcatggtaaatatatataacataaatcttactgttttaaccattttaagtgtaacgctcagggtattaagtatatttcacgatgctgtgcaatgtgatggacgatgcatcacggccatccatcttccccactgaactattttcaatattgccaaattgaacctctgtgccctttaaacactaactccacagtccctcatcctctcagcccctggcaatcagcattctactttctgtatctatgaatttactaccctaggtacctcatgtaagtaaagttccatataaaacactttacaaaatttgcatgtcatccttgtgcaggggccaggttaatctctttaatcattctaattttagtatatgtgctgctaaagcaagcatcatatatatacttctttttttttgagatggagtttcgctcttgttgcccaggctggactgcaatggcgcgatctcagctcaccacaacctctgcctcccaggttcaagcaattctcctgcctcagcctcctaagtagctgggattacaggcatgcaccaccacgcctggataattttgtatttttagtagagacggggtttctccatgttgaggctgatctcgaactcctgacctcaggtgatctgcccacctcggcctcccaaagtgctgggattacaggcgtgagcaccgcacccagcttttttttttttttctcttttgagatggagtctcgttctgttgccctggctagggtgaagtggcaggatctcagctcactacagcctctgcctcctaggttcaattctccaacctcagcctcccgagtagctgggattacaggcatgtgccaccatgcccggctaatttttttatttttagtagagacagggttttgccatgttggccaggctggtctcgaactcctgcctgactcggcctcccaaagtgctgggattacaggcgtgagccactgtgcccagtctatcacatatacacttgtgaaaacttctaagacttccttacaaataaaagtggtgactgagaactaagccatatacctagtgatatctcagtggtgatgataaagttagtttttatttgacaaaatctatttgctatcagaatactatacttaaaaatcataagctttaacaattaaatcgcatgtataaaaattttagagaacatgcagctatagcaacttcaatgctatacaggaagctgaagacataggtccacacctcagtatctgccctcaggggatgggcagacaaatttcaatgcccccccccaaccaaaagcaaagacacaaaaggcatgtacaagacaatacaagttgttgccaagcactgtttcaaagaaataagatttaactcatgcttttaggagcatatgtaaatacataataattatcaaaagacaaacacattaaacaggcttttttaaacgcactatctgaagtcaatgaatccatcaacaggagctgaaattaagtaacgccctggccttgaccctctgaccccgtttcatgctcgaagtccaaagcctcttcacaaatagtgtttaggtgcacaccaagtcaacattcctttggacacgtctcataacttggaaccggttaatagatggatccactatttttgatgagatattataactaaccttctatgatttactttctaaagcagcccatagtgcatacggcaggaaaactgttaactaataatggcacttactcagaaaatacatgcaaaatttgtttctgagttgaacaccaacaagcaaattaacatgtcttccaaactccgtctcacatgaaacaaactcatgtcattcccagttagtgtttgtggaaacatatttcaaaattaatctcaaaattcgggaaacatatttcaaaattaatctcaatttggattcatctccatactcagggtggcaaacatcactgatttttttcccctcctcttttaaaaaatgaaccttgaaggcagatgcttgtgaaaaacagaataaccagcccttgttccagtctaaaatcattggttgttcccaagactctacaaaaaaagcaggacacatctgctctagtgttccatgccaggaagtagttccacagccaccactgtggtctgacttcacttcccaatcattttaatttggatttctttttagattttgtttcaaattacagggccatacaaacgagctggtgagttgagaaaatagctttggaactgcattggatcatcaaaagaaacggcagactttggcgtgggagaccatgcctcaggctccatccatttggttgaggtgcccacacatgcacaaaaataaaagaatggcataaaaacagacaaaaactactgacatgtcagtcatcatggcttaaggaaaagctcacaaataatttctctggaatctcaccaaaatttggagtaaaagatgatagcatgctaaatcagttctcttgctacttctaaaatactaacgttcctgaatggggctcaaggtggaatcatttcgaggcaaatatcagttctagtagataaaagtgttgtttaaaacctcattaacattatatataaatattccccaaaatgatctacagatccaatgcaatccgcacttttttttttttttttttttttgcagaaatggtagtgggggcagggggtgaggaagatcttaaaattcatgttgtaatgcaagagactccggatactcaaagtaatattgaaaaagaagaacaaagataacggactcacacttgctgatttcaaaatttactacaaagctacaataatcaaaacagtgtggtactacagtaagcacaggcacacagatcaaagaaaagaactaagaattaagaaataaacccatattatctatggacaattgattttgtgtaatagtgccaagaccattcaatgggggaaataatagtctttttcttcctttttttgagacagggtcttgctctattgcccaggtggcgtgatcaaggctcactgcagcctcagccaccccaggctcaggagatcctcccaccacagcctcctgagtagctgggactacaaatagatgttatcatgcctggataatttttttgtagaaatgtggtcttgccatgtttcccattctggtcttgaacttctgggctcaagtcatctgcccaccttggcctcccaaaatgctggaattacaggcatgagccactgcacctggcaagaatagtctttttcaacaaatggtgctgggacactggatatttatatgcaaaagaataaagtcaaacctctacctcacaccatatatgaaaattaaaatgaatcaaagatttaactgtaagagctaaaactacaaaactcttagaaggtaacaggtataaatcgttgtaaccttgtttcggacaatggtttcctagataccataccatagtaactgccacaaaagaaaaaactgataaaatagacttctaaattgaaaatttttgtgtgtcaaaaggatcctattaaggaagtgaaaatacaacctacagaatgggtaaaatatttccaaataatgtatttgataagaatttaatagtatccagaatatataaaaattcttacaactcaataataacagcaggccgagtgcagtggctcacgcctgtaatcctagcactttggaaggccgaggtgggcaggttgcctgagctcaggagtttgagaccagcctgggaaacatggtaaaaccctgtctctactaaaaatacaaaaattagctggatgtggtggcatgtgcctgtaatcccaactactggggaggctgaggcacgagaatcgcttgaatccgtaaggcggaggttgcagtgaactgagatcatgccgcttcacttcagcccgggtgacagagcgggactctgtctccaaaaataaaaataaaaataaaaataaaaataaaattaagaaagtaaggtaaacaacccaattaaaaaattgggcaaagaatctgaacgtacatcatttatttgaactgaacaaaataatccataacaaaccattgcaatcgcatgaagaaaacactgtggttgatatttaattcctcaaatttctgccagcgtccatttggagcacaataaacaagatcaatatactgcactgaattatacatattaaggtcaacaatttgtctgccagaatggtagagagcgcaatatttttttaaaaaaggaaactttttttacattcattattcctagaaagtgtattctttttaatgtagctaaaaggatttactttttcctaaaattatggagtagaaatacataaaagaaagtatctgtttgccaatggtaaaactataaaaatcattcaggaaaacggatgctgtattacatgtgaatttttaaaggtcattatcaatgacttccacagatcatctggatgacatatgcactatatttacagattccataattaagctccaaagcaagaaaaagagagcttacctaatatcacaaccaaaaaaggcatagagagctaaacgtatacaaagcactctactaaccaccactatggggtgagttcgacacctgcaggtctgtaacctcaagtctgcagacagaccagttggggacctaaggtatgaagtgtactggcattcacacatttgtatcttgctgtgtggagacatttcaacatggcagtccaaatgtcagaaaactaggaggctgtcttaatagtataccgtactttgccattcatttgacaaagcattttcatttataaatgagtggttctattttgaaagagaaattgtcttgggtcaaagatatacatttagacacaggcagctaaacttacaggcctcatgtctgttacttaataacactagggaaaatatgaataaggagctctgagactattatgaaaccaatgggggaacaaggctttggttgttgataatatgtataaatgttcttggccagatgtgggggctcacgcctgtattcccagcattttggggggccaagatgggcagaccacctgagatcaggagttcgagaccagcttggccaacatggtgaaaccctgtctctactaaaaatacaaaaaaattagccaggtgtggtggcacacgtctgtagtctcagctacttgggaggctgaggcaggagaatcacttgaacccgggaggcggaggttgcagtgagccgagatcacgccactgcactccagcctgggtgactgagcaagactccatctcaaaaaaaaaaaaaaaaaaaaagttcttatgtccaaatacttaagtcagctgtaaaccattaaatctatatacatttaaaagtcatttcttatgaaaaacaaagtcacacctatgttcttataagaacaaagtgacagctctctatttgctgttatgattttttttttttgatgttcatccttgactaacaattacacataaggatacttgaaattctcaataacattaaatttctattttgttgggctgggaagtgctataaatattctattttaaacctagtctactttggacccactaaacccccaaatcaacaggcttattagaaacagaatatggaaacactgtctttgaaataaccatgctgcatttttcctgaagagtggaacattttatcaagaggccacagtaaaattgtaataaaaaataagcatcctttcattattgcgaatttcttgattccccgccatatctttcaatcctgccccattcactatggatttattcagccagagatctttcccgcatctggtttataataattcatgtttttattaattttgaatgctagaagaaaaaaaatgggtatgaaacaattatgcctttgttccctctttatttcctactgcctttctcataaattggttattatagcattctgtaaaacagccatctctgaaaagagctacatttttagccttgaggtagctgcaaagagaagcacactttgataaataacctcagtgccaatacaaagagtagaatagaatccttttagcagagatttaaggaagattacaaaggacaaagaaaacaccatcatttttaagtaacaatttgacaaagcaaaggttgaaaggatgaagggattctgcccttttgaaggattaataaataattaaagcagaatatgaacactgaagaggagccatagtttcactgaaataatgattccatcgtttgttgaatgaaaaaatattaatgaagacctacatagtgatttaaaagaggagattttatctctatacaaacaatgcctgaggccattctttgcaagaaatcttcataatctgcctgaaaataactttttaaaaaataaaaacattaataaatgactgagcctgggaacttgcacataataattaaaattgaatgaaaaaaatatgaaattataaaataaaacacgggccttttataacacaacaggacacttgaaaattcacacttatttgtcatgggaatagcttcagactgtggttggcggtcaaacaggacagcacaattaaatcaagtagatgaccaaatagcagagggtcatggtacaaagaaggaccatgttgtaaaattttattaataaaggtcctcagaaccctgatttatgctttgttatcttggccaaccacatccatttagttagcttgatcaatcacagctttagaggatgctgtggcctaggaaagaaatttgttttgtgtggtgcttacgctagatgtcaaggaaggagttttggtcaggtctttagggttacggaggagcccacttcatcagtccaagttaaggagcatctgcctttttatcctggggactggcttcaaccttatatttataattactaatatctaaaaagtaccagggtccttgctggatcttgaggaggcaaggatgaccaacatatatctggaagagttcacaggatggagggttagtagagatataaacaaataatttactccaagttagagtatggtattggaggtggatacccagtgctttcacattgaggttaagtaggggaaaattccacttcagagaggaaaataggcagcagaaagaacacagattttggacttctggcaggtcttggcttccaccccactttcatcactttactatctgggctgggcaagttggcaaactctcttaggttcaaagttcaatttcttcaactgtaaactggggatgctatcactgaatttccgagtatcttcactagcccatatgctgcctttgtgtgaaatgcaagaacagcccacttccagtgggtgtgcacaatgccagagggcttggctccttgagtgggatgtagaataaaattatcagtctccactcttaccctaaaccacctgccactgccacatctctatatggcggtcctgtacctcaacggggaacattcataaagaaagaatgtgaccatcagcattatcacaaagaggcactcattagttggttacatggttgtcactcaaatgccagctcttttctccgttctctatgcaaattagaaagggtttataggacttgggcattttacttgaatcttgaaaggtgcaacttttcaagcaaggaaaaaccacaagcagctttttttttttctttttttttttttttggagacggagttttgctcttgacgcccaggctggagtgcaatagtgcaatcttggctcactgcaacctctgcctcccgagttcaagtgattctcctgcctcagcctcctgagtaactgggaattacaggtgcctgccaccatgcctggctaatctttctatttttagtagagatggggtttcaccatgttggccacgctggtcttgaactcctgacctcaggtgatccactgccgccggcctgcagctgttttttttgttttgtcttttgtttttaagggaacttgcatagttccgaaaaggaggaattgaagtgggagggggccaatgtgagataagaggtagggtgactggctgggagtctaatgacactgatgagaggacaggatctcaggtaagtaggggatgtgcagagatttcacatgaacacagaaggccaaatatacagaacttgcaactaataagaaataatgggtgagggagaggaaggcatcatggatagtttaggccaaccaagagaactcagaatagagtgtgtaaaacaagtaaatttccagaaggacatgagtgttatacacattgattgcaggttcagaggcacatgggatatttggggtctggaatatggcactgggattcagtacgctggctgtggctagacccatgaatttgggattcactgaagttagtgggaaagtagcatgaacagacaggatgcctcagggaagcacaatggaagatacaaggccagggccagaactcacaagcatgatgaaccctatgctctggtcacagtttactgctcacaaatttaatgtcaattttccccttcaccgatagcattccttcttctcagcatgactccattcttcctcattttcacccataaaagagaattctaattggaagcataatttactgaagcagatatacctctcccactaaagatactggcagttccccagactggtgaaaacctcttatccataaagcaactgttaccattatttaattaaaccattgtatctctctacagatgtttgactgcattaagcacatcctaattgcttgtatttataagcacaaacttctatacaaaaggcatgcatttttagggactttaaaattttctccttttgccagtgtctctgaattttagtatgctatttgtactgaactgactccaaatctaaaatttgattatatacagaaatagcaaataaatgcaactcagactaatgacaaagcatttaatcagagaatattagaacgactacaagacataacctggaaaaaaaatctatgaagaacctatttagaaagtaagctaaaagcaacactttttattatgagaaattttaaacacatacaaaagtaaaaagaataacatgaggaacctctaataacatttggcttaagcaattagcacccctggccaatcttgaagtttcaactatattcctactaaaaagggacgtattgttttaaatgttccttcaaatgaaaaaggactatagatgacaactaggttcaacccagaaaagctattctccccagcaaaccacttctgtagctttgacactagcagctcagatagtgtacagggttcgttattgcaaacttctctttctatagagaacagtcatttaaaaatggaagcacccaggattccaaatgaaaggtttttaaaaaagattatctttcagaatgtggcatctggtatatttagaatgatatatatgtcattacttaaaaaaacccaactaatgggtggattgagagcatattacatacatacacacacacacacacacacacacacacacacacattaagagcacatacgtaatatgttctttatttttattatactttaagtttgagggtacatgtgcacaacgtgcaggtctgttacatatgtatacatgtgccatgttggtgtgctgcaccccctaatatgttcttaatccaacctaatggctgtttttttttttctttttacagaaaaagattccatgatactagttatctaaatatcctccctggtactgagatttgaagtttattgtgctgccctattcttgggcatttcgtaatattcaagatatctgaaccaccatctgttctgtggaagtgtgactaattagtggctaatgttttcagtagtatagtgccaaataaaaagttctaataatttaattataaagagtcaacaataattgctgggtgagggtggaatattggtcatcaactttttagtcctttgtaatggcttatttccctatagttattacctatgccacttcaactgaagtcacatgtgaaaacaggcttaagatagctgtaaaaaacaaacaaacaaacaaacaaaccatgttttctagaagattttagcttcagttcattaagactgataaattatttcattttgtaccttctacaactttttggagaacttctttacacttatttaatacatagtattttaaaggttccttactgatgtctattctccaagtatacctgaaaagtatatttgtttgctaaagaaacttgatacagtgaaaaattaattggagatctctgttctcaattcatggtgtagactaaaaactccacctccactatcttcataaattcttgctcaacactgagttgctccttctgaacaaaagcttggcacactatgaagttgctttttttctcttcttttttaaattagagagggggtttcaccatgttggccaggctggtttcgaactcctggcctcaggtgatctgctcaccttggcctcccaaagttctgggacactgcacctccctgacatatgaagtttcttctgcaagttatgtagctcaaagtataatttcagattccgtccattaatgtgcagtactgaacagaacatcatcacttgacacatgccaaatatttcacagcaatacaaacaatatttacaaggccacataaatcaggaaagaatgagcagaataacactggcataaaatgggaaaaagtgagggccagctgttcccttgagcggtgtttcaggcacttcaaagtcggacttactgtaatgggtacatccatctacaacatcctgggtgctctgattccagatgataacctgtatctatttccaacccaattaacaaagggtaggattctttatggggaaggatatgccagatacatattgcttatatgttggtagactacacactaaatctccagtataggtacatatgcttatattgaaagatgcaccaacataatcgtcatctatgtacctttgtgaagtaagttaaacagttatgggcattttggcagctgacagagactcatgtggtatttgattctctttccaagagaaacagaaatgagagatcttaaatgaaatcattagtcattaggaaaactagggacataaaagacagtgggcacacaaggtcagtttcctggttttgataatggactatagttacgtaagatgtcactggtgaggcatgtgggtgatggatgcatgagacctctctgtactatttttccaagttcttgtgagagtacaattatttcagaatataagtttaatagcccactatcttttaagtttaaacaatgatgtggttcagagaacactcatggcttccctgctcagccatcaaagagaattgtgacttactgaatataacaataacctcaaagtcacaagtcacagttatgtgttttggctgtgctacttataatgcatgtgacacaggccagtaagttactcaaattttaagtttgagctttttcatttgtaagatggaacaatcgtgacactcaaaagatgaagaatgagtttttttccccattaattgtaaagtaccaaagcatcataatttgagagccataacaagattgggcaaattagaaaaaatgctgccacgtataattcaataacaagtgtccaattattacaaaactataccctaagtcaggcgacattcctccagtcttacaagtatggagaggtaagaactgattcaattgctaaggctagtaagctagttccagcctgacagtttcatcgtaaaaggcaagctgttctattaacttccatattcctcaaacagataactcacttcctcaattttcctctgggggaaaatacatgtccatgtgcagcatcaaaagaacagcttacttaccaacttcatcctgaatctcctcggccactgcaggcacgttgtagagcagggagagagactgattcatgcgctcataaatcacacggaggtgtgtcataacctgcatcaaaggatgacaactccaggtcaacaatgtctgggggtaggaatggttctttttctttctttttttcttttttttttgagacggagtctcgctctgtcgcccaggttatttttcttaccaagcactgcaggtagatacaaacttccaaaagaaaactgacaaaacactgctactgttaaaaaggttgaactgaaagggcaactttatttttcttgttctcctatttctgttctctaactttttgagctcaggtttaagacttgatcttgaaacttaccattatcttgtatgcttataacagccaattaaaaaggctacctctgccacctctgattcctaatactgaggctctcttaacaggaccctcatgcctaaatacatttctttgcaaatttccccctagaaaacaacgtatttcaatttgattggctatttcatgctatatatatttaactctttcattcaagaaaatgtaaaatttcacatttcctaaggtagatcccagttttcagcctttgggaaccggggagtataaaatacattattactgggcttcatttaggctcacatgaaatctcaacattccagtaggtttatgattgcctgccatacttcagttgaaccagttttcaagattttagtttatacaacttttgtttttctcattttagtcattggttttaatcagttccttagcaatcagttagcagtagactaagatttttacatttgttattttcataactcagaaaatgccaaaccacatattgctctaagacaagcttttagaatttaccagaagttaaagagctcttgccatagggaaaacacctataggtgctcggagaatgcgtgggatcctgtcaccaacccaagaagcaagaatcctggattgtcaaagctgcagaagatgattataccccacgcttacctgggaccggatctgagcggctttcttgggatccaccatgcgcacatgctcgaaatgctttagggtgtgctgtctgtccttctgttctgcgcggacatacttctttagcatattgaacacgtgacgaggctgtgggaggaaaatgaaaaactctttttcaagtttgtgcaaaacactgcttcttccattggcgatgggttagaggttccactaatgcatccggtcatgtgaacgtactgtgagtcacctttttgcaggtctgccttctaaacatttctcctactcctttcttaatgggtaattacttagatcggctgcttttcacttccacaagagcatttaacattctcgacatatatgatgactgtcctccttactcaacattttctttttaaataggagtactctgctatagaaagagaacagatttgaggtctgtcaggttaagttaggtccttctcttttcgcacccaaggggcatatgtgagactacattgctacgtgtacattttgaagaccagaggtaatgtcacacagataatcccatcaccagtaacatgtaacatacgaaatcaaaatgagaaaaacaggaaatttaaccactattttgtaagccaaggagtaactgaactgtaagagacattatatttttctaggagaaaggccattgctaaactgtatttattttactctgaaatttaattaagttctttctaagctatcagattctaattctttcagcaacaattacatttcgtcttaagtgctcctattttctttctaattggttccatttcatttttattttagttttacctgaaaacatccatcctaataaaaactaaggacaaagattccctggtcttcaacaatttcatcactatatgcattccactacatgattttgtaagatgatttccaaaaacacaacatttcttcttcattaaaacaaacaaacaaaaaaaccagttgtgaaaattcatgttgggaatagaattttggtcatttgggcaaacctagctattattaacccatgtgtcatgagtaccctgaaaaccagttggaaggtacaaaatttattccagagatggtgtgtgtggtggtggggcgggtggtaatggagcttttgttgtgttatccatatcctatgggatgtgcctctccttccccttttgcttagttaacttaggagccatctccctgccatctcaggtggaacgaggtaccctttttctgtgctcctatgaaatactgtgcaaatccccattaatgtacctaactcattaaattatctatgattcttactcccctctttaatgtgagatccacagggctggatttggtcttttttctttatttggaaccccaataacacagtgcttgacccagagggtgctctgtatttgcttggtgaatgcctgccacagaggccatgctactgtacttgagaaaacaaatacatatacacaataaaaataaaacaacttgggctcatctgccttcttttttcctaaaagaaatgtgcttctctataatccccagaaagacagccatcacagcttgcaacagttcttggcaacttattacaactctcatctgaactgtgaaatctggttgaatttacaaatcagaggatgaccttttaaatctcagaagaaaagtagtaaaagaggtaatgactgataagctatatctctatatattgaaaagaggataggttatacatgtgaattaaaaaaaaagaacatttgaaaacatcagagattaaaggctgactcttgttgattgtgaaggatatttgatatgcagagttgtgtgatcaggatcttgcacaaccaccctcgatgcttgcttgttattaagcaccaaggtcttagaaatctctctagttctgttaccattattcatccaagactggagacagaaggggctgtgactaatcgcatttaaccatgatgttccttcctggccttcatggatgctttcttagttgctctatttcatttttctcccttgtaaaggatttattgttttgaagaaaatgggatgaatttttaagagtttaaataagaaaaaaaaaaagcacttcaattaaaaaagtaaggattgctttgggagtctgaggcaggaggatcacttgcagccaagagtttgagaccagcctggacaacattacaagaacctgtctctacaagaaaattttaaaaattagctaggtgcagtgacacatgcctgcagttccagctacttgggaagcttggtcaggaggattatttgaacccaggaggttgaggctgtagtgagccctgattgcacgactgtactcaagcctgggaaagagaataactgcctgtcttttaattaaaaaaaacaaaaaacaaaaaacaaaaacagtaagaattgcttttcatcataacttctttttttccagttagtcatctatgaatgtttttgtaagatattttgtcctaaaaggactgtcaccaacaagcaggtacaccaggatgccatggccccaggctggccttggcattactacttcaagctaaatttcaatttagagaagatgcaggtcatttctgatgaccaacatctggatctccccttttcttctcctatcacaacaaacagcatatattcccactaattattattattattattctttgagatggaatctcgccctgtctcccaggctggagtgcagtggcgtgatcttggctcactgcaacctccgcctcctgggttcaagtgattctcctgcctcagtctcctgagtagctgggactacaggcacgtgccaccatgctcagctaatttttttgtatttttagtagagacggggtttcgccatgttagccaggatggtctccatctcctgacctcgtgatctgcccgccttggcctcccaaagtgctaggattacaggcgtgcgaccagtgcacggccaattaattattcatgttaacatacatttaaaaataagcacaaaagccttgacttttcccacctatgcaattcagatggcagtatctttcagatagtatttgcagattaaatgtgttcagtgatagttacccagaatgatgcgtagtccattgctgatactcaatacacatttatttctttcactcaggccttatctataaatcatcgacccctttctttcctctaagtaataagagttcaatgtgtattgactgcttctgaatgagacagtatattaaatgctttttgctggtaactcatcaaatcttcgtctcagccctatgacagagtcatagcagctctccccaccttattggtgaggcatgaagcacaaaggagattgtggttacataggctacatccctggcccaatggttacacagctagttagtgttagatttgaagaatgggttagtctcactgtcttggctccagagcctccttctcctaatcactttgtgatctggcccttcaaggagaatctaaaatagaccaagtttaagatagttctacaaagcaacttacgaagttaaaaacaggccaggcgccgtggctcacgcctgtaatcccagcactttgggaggccgaggcgggcaggtcacgaggtcaggagttccagaccagcctggccaacatggtgaaaccccatctctactaaaaatacaaaaattagcaaggcatggtggtgggcgcctgtagtcccagctactcgggaggctgaggcaggagaattgtttgaacctgggaggcggagcttgcagtgacctgagattccaccactgcactacagcctgggcgacaggacgagactccgtctcaaaaacaaacaaacaaaaacaaagttaaaaacaaagaaataagtgcatggttagaaaagacagtctgttccaggagtacttgcctgactttctagtttttacaagtgcaggtaatattctgtgggccatgctaacatcagctcctttaattgtgcagaaggttcagatttagcttgttcagtctctcaattactgtcctaggtttctggagttccattattccttagctaatgcatgaaattatttagctaattattaagctaatgtgtggggagaagaaagagcaagataggaatgtcctctatccatgtggataaaggattaggattactggaaagtgattcaaggtattaaagttaggcttttgtgacattcatggtttctagtgctaaattcatccttatcttctattgagatgggtaattaaatggtgaatgtattcacatgttttcaattgctgatctcatttaatactgccattctccttcaaaatatattcctaacttatcctgaaaatccccagagtttgataataatgttcccggactgaactgagggttgggctactatacctcacagcccaataacgagatgcagatgaactgggaggaagagagtttttatttttgtaaccttttacagggagatggcctggaaattagtgccagaccaactcaaaattacaaagtttccagaacttatatgccttctaagctgtatgtctacgtgtaagtgtgcattcatctcatgacagaagtgattaacttctttaatccataactaaggtctgagtcctgaagaccttcctctggagtctcagtaaatttacttaatctaaatgggtctaggtgctggggtgattactcttatcttgtctcctgctaaatcagggaggtttgaggagttcctgcagacctccagtaaacttgttcttggaggcctgtagagtttcttcagactcccagtaaaacttgttaatcctaaatgggtcctgttaagaattccttggttttgccaggaaaggcctaggcaaaactcttggtgggcttttgttacattccagcctctgtataagggcgctggcttttttttagcttttagtatttaactgaaccactcagtcagtacggaaacagctgttacggaggcctgcattagtgagatttggcctgccacaataacagagtagcaaaggaggctctgaggactccccaggcctcagctcctccagggataatgagacctgggaaaccccttcactgtttatgtaagctgagatgcgcattttgtgtgcatctacataaacacaagccttttcttcctaatgcctattggataagcaaagcctgggaacatcagataattcaggaagaccttaggatatctcccaataaatgaatttgcagggttctgcttcattgatttggccacctaaacacatctctaggaatcatgcttggaaatgaaaacaaaatcagattaccttctttgttggacggtaggcaaataaatcataccaaataaaatggtagttatctctatccctcagaaacaaatactatttttagttaagaaagaaaaaacacaggtgtaaaaagaaaataattcttggggcccccaaatcactaagctaaagggaaaagtctagctgggaactgcttagagccaatcaccctgattgtctaccctggagaggctaatcagaaactcaaaagaatgcaactgttcatctcacctatctctgacctagaaggcccctccccacttcgagtcttcctgctttttgtttcaagctgtctcgcctttccagaccaaaccaatgtacttcttatatgtattgactgatgcctcatgtctccctaaaaatgcataacactaagctgtgccccaaccactttgggcacatgtcatcaggacttcctgaggccgtgtcacaggtgcatcctcaaccagggcaaaataaactttctaaattaactgagacctgtctcagatttgctgggttcacatagataacagttccctatacttttatatttttgttgaggttaaaaaaaagacctccctccttttgatatatgattcctgcatatttcactcaaataaataaataattgccctcacaacttttggccaaaatacaaatcctccaggcttaacatttgttatttcttgagctataataatgtatctaagaataacaaggtgtcctgattgtctagtgaggtttattttattatgctaagacaaagatgaatttcttaaaattttaattaaaaacacagaaaccttcatacaggaatggtagggaaaaacccctctgttatctctatagaaacatattctcttaaagtaattgctattactattgtcacaatattcatacttaagacgggttattcatatgatcagaaaaacaaaagaattcagtggctcacgaaaaggatattgataaagagagtttaagaaacattttttttttttaacctgcaggcatataatccggatcaccctcatgtctttaaatcttctgttactagcaataatttttctgtgtattaatactacagtctggttatattggcattagatggctaatctcattattaaaatatatggcaaagaacagaggaagagatctgtcccaggaggactaattataccgaatcctatttattgtcactactgtttctgaaacagtgtttagctcataattatgtgctgtctgtttgcaactgatgtgacattttttaatttgtactaaactcacctcacaatcacactgccttttaaaaaatcattcaaaataatttattaaaggattaagaacaggcaccaccgaaatggcttagacatcatttacagcaagaggaaagagaaacataagatttacattttagaacattactcattttcctctctggaaacaagagcgtaatgtatttctacctctaggcacagttcctgccacaatttggttgctaataaatatttgttaattaaattaatgagtaacttgcagctagatacaatttcagaaataggcccagtagtgcagaatatccttcatagtcttcaagtagaaaacaaacacctctctactcagaatagtggccttcccaattttcaccgaaatactgacattaataaacctacttgatgtatctatatagtgtgcttgggtactttagaaagtagttttaactgggaactcttcccagaaaatatttaatggacttcatagcgtgcacaaactcgtctcaaagagaagattcatttcattaatttcaaaacatctcacatattgtgttcttatagtttgatgtcaaattgatgtaggtaatattgaagaaaatttaatggcctttcctgataaaagctaacacggttttggagatggagtctcactctgtcgcccaggctggagtgcagtggtgcacctccacctcaactcactgcaacctccacctcctgggttcaagcaattctcttgccccagcctcttgagttcagctgggattacaggcgtgcaccctcacaccgacctaatttttgtatttttagtagagaagggtttcactatgttggataggctggtctcaaactcctgacctcaggtgatccacctgcctcggcctcccaaagtgctgggattacaggcgtgagccaccgcccctggtgctagtacattttttattgatttccccatttcttagacgtatttactttttcatttttcttttatacgatttctcaaatttggtgttgctgggacttgggaaaagtctcatacatttgactaatggcaggatgactcaatgccagtcacgtctgaatatgtagcttattacttgacagttcacgtgggaagtgtattaaaattattaagtcctattgtcccactccacagctttatgcttgatctagaaatctggcatcttatcataatagacacttgtgccctaaacccgtttcttatggaaggcagtgaagtgtcaagagcgtttaaaagccctgggcataatcctgccaagaaggaagtaaatgactcactgtacgggaatcaccccaacctttccaggtcacagaaaaccctctcctggagcattaaattgcaccctggtggtttccaaaactgaacaaagcaattctctcctgctttcataaataggttcagaactattattttcacagttttacaccctggatttcaagaaatcttgagcatataaaatgtagaaaatttccgtgtgcaggtttaaaaatcacactttagagagttaagtctctctgtgcttgagatgatcttagttaaacgtaatatttggggaaactgccatggggacctctgaatcaccacctttattgtctttaatgccaggagttgagctgaatttttaaagtctcctgcaaaatttatccaccttcctttcttcagaaaggcaaacaaatgatctttgtagtttaaggtgagtataaaagggcaaatgataatcccatgccaaggtggacacagaagtcttgaatgaagcaatggagaaaatggcagtagattctcacactctccccctttggtgtttcttaagttttaacaatatggatccattagatggaaggatattgaacaactaatctctattaatccacttagtcataaggccagagcaaaacttttgtttatggccaaggagttatcccaatgttccttcccagggtatccggtttgctgatgcggctctgattttgtactgaacatgacgcaggagcatctaggagtcatctatcatctgttctctccttcccgtggaagcagatcacttcctcatagggatgtgtcaccaaagcctccatgtacttcctctaacaatctttctcctcttacggaggaagacatcttcctacttcacaattttgtctcaactttcaatgaatccttttgattttctaattatggctaacaaaagctaaaacaacagaaattgcagaaagaggagaaaaattaactccaatttgcagacggaataggaggaatccctttattaaatcacttgctcctagttacaggttataaagatggcaaacctgggaagtaaagacaagagtttatgttataaaaggtagaaaataggagtggttttaattctctcatcacttagtgaccttttttcttttcttttttttttttttttttctgagacggagtttcactcttgttatacaggctggagtacaatggggtgatctcccctcactgcaacccgggttcaagcgattctcctgcctcagcctcccgagtagctgggattacaggcatgcgccaccatgcccagctaattttgtatttttagtagagacagggtttctccatgttggtccggctggtcttgaactcccgacctcaggtgatccacccgccttggcctcccaaagtgctgggattacaggcatgagccaccacgcctggctgacctttttacaaatctggtaggtttcataaattttttccagggtattttgctagttctcagaaataatttattttggttgttcagaccacagtcataaattagtgaaggcagcatatagaactgaaatttagcacccaacacaaccccatgattcatgctttcagacaaactctagcacagaatggataaagagctaagatcttctgacctgggaatacagaaaggacagaaaatgtttggacttgtatgtcttcaagctttgtttagtcaaacagtgaaacatgtgtacacttaatgatgaacagaattagtaatacaacccagaaggcaaagcgcacagtgttgctgaaatcataagcaaaagatatgttcgactaactcggacccttgcagagatttgtcaaacggtctgatcatccgaaaaatgccaactgtgacatattcttgactttttaagagagatttacagcaatctgctttaattttgcatattcatacttggactatggtggtcctgcttcatacatcctctaactggttagcctattcaaagaaaagtacatttgcatttcttttaattttaccctctcctcttcccatacctaggcagtgttatgacctattagaaattctgagttttttgttgatattaaaacatttatataaggaaactcaaggtgatgatacttaaaagccaaacatcacctggcatctttaaactggtatccatggtcaaccttcacaaaatgaatgaaccccttaaagcttatgcgagattgtgtttgcgtgtgtatgcgtacatgtttccagggtgaggattctttgctacccatctgttctctatcagtcataccaggcaggtgaataactactggatctttaaatgtgctatttgtctacaaaaactaaatatttatattttcataatacattttcattctcaaagataaaatgaacatatatattaacattaaaatacgtaggtttgctggaagaaagcagagcgtaaaaccatacggtgctatgggttttaatagcatcctgtgaagacctatttgcattctgaaggcagtgactgagcagtgctccactgtggagggaatctgggtgatgaatatggcctcagtggcaaaagacagcttttaagctaatgccttcccaacatacttcttaatgttctatgtaacttaattaaacccagaaaccactagtatctcttgttacatacttcccatttgtatgtagcaagattttatcgaacttggtaaacattcagaaggtagggaagtaatagtactgagtggctttactgaaagagcatgtataccattcagcatagtttataagattttgttcactaaatgctaattctctcattttccttcccattcactatctgttattgggtttgcccttaggagtgcccaagctaatgagtccccctttgctcaccaatgtatacagaactcaactaaaaataaacggatggtgaacaaataaataataaatatgtaagtatagagcaattatttacttttctgaaagatgatctttttggcctggcagtctttcaacttttaattccattctgattagcttcataaaattttggttaaattcaaaacctgctggtggaatgccttaaacattataatattcatctgtccacataccaagaactcagcaaataatttttaacttactatcagttacattgaggtacagatgtcccatatttgctttggagatatatgctatatacatatattttataagataatttcttttgcaacgaaaagtgatgggtagaaataattggtttgttgggtgaagggcaattagcggtatcatataaaagctcaagtttagtaccacaatttcttttttgctttagaaaagaaaggtacaccaacacccacattggttaaagtttggtttagttgtaatccacatcatatagtggcgaaaaatttatttatgaggtggtttaaaccttctcatgccatcacctgtttacctgtgacaaacctcccattaatgtctacccttgttatctccaatgacggctgtttcttgttgaacatttattgctcttctgctggaatttaccaaatagccttgagcaaaatctcaacttagtgatgaaaccgtgctctttaatgaagagtctcacagaattcatgttctatcaaagaattatgtgaagaagtttccagagatctcagcaaaatttaacatgtggctgaaccattcaaaaatgagaaaccaaagaaggatgccgatgctatagaaactgccaacattttttttttgctcaattaaactgatagcctgaatgtgaagcagcagatagaagcatgaaatgaatttcagtatggataagatggtttcaatcgttaagacactgaaaaaatccaaacaacacaactgggatagataaacagatgtacaggaaaatgtttcctaattctcacttccctttagaaaatgcagttgttgaagtcagaataataatcatgataactgtctgatgaaagatttagactaagtatctgtaaaaacaccaaaaatctcagaattacaaagaaagctttggctgtgtatcccttatctttaaaacagttcaagtcttacaaattagggggtgctaaggttttccaaacctaggcctacaatagaaagttgattgaaataaaaaatccctatctggcctttggtttaactgtacaggatcacattaagtctaatttctcttcaacagtcaggacatatcatcatcttctgtctatgaaggataagcagaacgctgagagttacaaggggaaaggctcagacagcatttagttcctgtttcatgaagctatgaatagtttgagtacgagccctgacaaagtaaaaagcaggaagtgcatgactgtagagggcaggttaagaaatgatgaatgcttagctttaagtatttaatctggtagcttgcaggcctccaaaggtggtagaagttaacctcctgtgctgcagttctggagaggcatttaattcttccagggggaaaaagtgctaactccttgattttccaaagaaagtctaaggaaagtaaaaaggtgaaggggttggtgtttagaagagtcactagccttcaacagagtaagagttttttctgagtgcaaagacacagctctgctcaacttttttttcccatggggaaaacaactattttaataattgtaatatttcaagtatttatctcattttttaacttttaattttggaacagcgtcttgctttgtcatccaggctggagtgcagtggcaccatcacagctcactgcagccttgacttcctggttcacactcacacctcagcctccagagtagctgcgactacaggcgcgcaccatcatgcctggctaattaaaaaaatctttttttttttttttttttgtagagatagggcctttctatgttgcctagggtggtctcaaattcctgggctcaagggatcctcccacctcagcctcccaaaatgctgggattacagctgtgagccaccacatctagcctaaagtatttattttaaatacatgtgcctatatatgtatgactctaaatatgagtcaaacaatgcatttttaggttgaccattcagtgtatttgcctataggtacataactaaatcagaaatttgaaacatacagtatactcagacacagggactcaggaaatgaaattcattagtagaacaaggaattctagctgcacaaaaacaacatctcataacacttccacgtttaggtttaaaaactgagtaaaagtatgatttaaatctgagcttcaaagaaactgaaaacaatccacattgttttggaatcccgtgtttgcaaagtctgagaatatacggtagaatttgttaagggttagacaggtaattattctaagtggtaacatctacagaatctatggaaacgacacttttgatttacttatattcaaataccatttactgaatacagttgtctgcattttccaggcacggtggttaagtatgagggagatctcagaaatatttatgtatgactcctattacaagatgtgatctttttcagacaaccaccagtaagctctggatttatgtcttcaagaggaaggtataaaagtcctcaagaaggcatttaattacgcctgcaatctcagcactttgggaggcggaggctggcggatcacgaggtcaggagatccagaccaacctggctaacacggtgaaagcccgtctctactaaaaatacaaaaaaaaaaaaacattagccaggcatggtggcgggtgcctgtagtcccagctacttgagaggctgaggctggagaatggtgtgaacccagaaggcggagcttgcagtgagccaagatcacgccactgcactccagcctgggcgacaaagcaagactctgtctcaaaaaaaaaaaaaaaaaaaaaaaaaagaaggtatttacaattttcttgtgcctgccaaagtgcagacctaagtgccaggtcaagccatacaacattaaaacttaaatgaacacctaaagatggtaacttaacaaaaatggcaagtaatgccccctagactccaggcctgtgaccacccagccacattttattacaaaggaaagatttaaaggtgagtcatggtggctcatgcctgtaatatcagcactttaaaaagccgaggtgaaaggatcgcttgaggccagaagttcaagactagcctgggtaacacagcgagaccctgtctttacaaaaattttttaaaaattagccacacatggtggagcttctgtagacccaactctcatgaggctgaggcaaaaggattgcttgagcccaggaggttggggctgcagtgagctacgactggaccactgcatgccagcctgggtgaaagagcaagaccctgaaaagaaaagaaaagaaaacaaaagaaaagaaaagaaaagagaaaagaaaagagaagattagagaagagaagaggggaggggaagagaaaaggaaaggaaaggaaaggaagggaagaaggaaggagggagggagggaaggaaggaaggcaggagagaaagagaaacagagaaagagagagagagagagaaaataaataaataaataaataaatccgagttaagaatttaacaggaatccttagatcaatcaacaacagtgatctgatttttgacagtaaaatatttcttcctaatccagtttttaatttttttttcaaatgaacatgttgcctaattccatatgaagcaatgcggaggcccacaataagcacgattacaaccactctaaaattatcccctttgataaaagatgacacttcggcaaacattcttgccactgcctttcctgtgatggctgatgagactaaactgagagtttaaatgtacatttgttaaagcctccattcagccctcagcttatttttagtcccatcaatgtccatttagcaaagatcttactttagagattggactttcagctggaacgcttcacaagtttctgctataaagattctggtctcagcacccaccagcctatccttctctggcaaatgatcacacggctcctctcctgaaagcgtgttctccaaaaaagagaggaaccaaggaacttttgttctgcagagatataaaaaaaaatttcctgacaagtgccttgctaagatagagaattttggcaaatagaaaatgaaaacgctaatatgaatattctttttcaaaagctctttgtttagagaggaagctcgttctagtgagaaggcaccacagtgactcgcggctctaccctctcccttcccagcagtgtcaccctgaaccagccgctccatctcccgaggttgcagtgatatcatcggtagaacagggtaaatagtatcttacgtcttggaagaatgccacgagctctttaacggctcctcatggctttctgtgcactgtaactttatccatagaaagaaaaatcaaaatggtgaggaaaatcggtgcaaatgggtgactttctggttaagttgcataaaatgcacaaacaattccagccaagattgagtgagaagaactggatttaccctcctgcctgaaccaccaataactggacaatatattcatatacaaacagcgtttcttttttttttttgagatggagtcttgctctgtcaccacactggagtgcagtggcacaatctcggctcactgcaacctctgcctcccaggttcaggtgattctcctgcctcagcctcctgagtagctgggactacaggtgtgcgccaccacacctggctaattttttgtatttttagtagagacggggttcaccatgttggccaggatggtcttgatctcttgacctcgtgatccgcccgccttggcctcccaaagtgctgggattacaggcgtgagccaccacacctggcataaacaacatttctgcaagacattagacatcaggtgaaggacactgattcctgaaaaggggaaacaaatgaggacttacagctgccaaactcatggccctgaatttccaggtcatggtttcaggtggggaaacccacacagagcctagaggactcgtggagtggaggacatgaagtgtgtggagagatcaaggtagttgtaattcacaggacagggtattggtgaggagagagttgctccaaaagagaatccagagatgtgcagagtgatccctgagaatatagctgagtaatgatgggtacatgcatgtgaaagaaactgaagccagggggaaaatcaccaaaaagaattagcattaacagtgcttggtgttcacacagggacaggaataatgcctcttcccacgagtcaggtgagaaaacttaacattcatggtagatgactgagaagggtcttgcctcactagtaaggaataactagtcctaggctgataactgcttctatcccacctaacaaatctaaaaatgcaaagctcaaaaggatcaaactgtttccaagtaactcaactatgtgacagaaaaaagctcaagaatattacaaaaacacctagcattcaacaggtttaaattcagcgtccgacatttaataaaaaattatgaggcataaaatgatacagggaaatgccacatgtaataataagcaatcaaaattgattcaaagttgacagagatgttagaattagcaaacatggatatttaaacagttttcatataataactgtattccataggttcaaaagttaagatacagacgatattatgggtgttgggggtagcccaggttaaatttctatatacaacaactacagtatgtgaggtgataagatgaaaaacggccagatggaattaagggcagactgaatgataccatggcatatcaaaattaaattgttaaaaaccagtgatatagagaaaactgtaaaaacagaaaaaaaagacatgttatttttagagaaataaagataaagatatcaacacaaataagacagcagagtatcatctttcaggcagtgaaagagaaacctcaatccagtattttttacccagcaaaaatatttttcaaaaccaaaggtataaaagggacatttttggtcaaagccaaacaaagatttcatcaccaacttatgtgcactcaaacttttttttttaaagagacaggatgccctttgtcacccagatgggagtacagtcatgcaatcacagctcactgcagtctcgaactcctgggttcaagtgatctcctatctcaacctcctgagttgctgggattgcaggtacaagccaccaagcccagtctctaagacattttaaaggaaatctctcaggcagaaggaaaatgataccagctggatctgcgcaaagagtttacagcacccaaaatgatgacttcatgggtaaacatgttgttttttttttaaatttacaactcattaaaaaataactgtttaaagaaaaacatcaacaatgtagtaaggaaaaagtatgacaacaaccgcttacagagagagagagagatgaaaaatggaagtacttttgtaaagtactgtctgtggagtggtataatatcatttgaactgacataacatcatcgtgacaagtttagaatgttttctataagcctaaagcaaccagtaaaataacaaactagttataacttataaacccacaaaggagataaaccagtaaaataacaaactagttgtaacttacaaaccaacaaaagagataaaatagaatcataaaaaatttctaattaatccaaaaaaaaaagaggaaaaaagaagaacaaggaacagactggacaaatagcaaacaaatatcaagatgacagattcagtgacaaccatatccataacctcattcagtgtacatggtcttcccaatccaaaggaaaacgcaagacccaattacatgctgcctacaaaaaatacacttcaaatataaagacaaacaaggtcaataagagtataaggatggaaaaatgcaccacattaatattaatcaaaagaaagctggaatagctttattaatattaaagtagattttggagcaaaacattacaaaggataaaaagatcatttcataagaagaggctcaaggagggcctaacagcctggaacatttacacgcctaaaaacacagcctcaaactatacaaaataaaaactgatagcactgtttagaaaaatggcccggtccacaatcacaggcagagctttcaatatcccttgctcaatgacaaacagaaagaacaaatggctgggcatggtggttcacgcctgtaatcccagcactgtgggaggccgaggtgggtggatcacctgaggtcaggagttcgagatcagcctggccaacatgttgaaaccctgtctctactaaaatacaaaaattagctgggtgtcgtggctcacctgtaatcctaggtacttgggaggctgaggcatgagaattgcttaaacccaggagacagaagttgcagtgagctgagattgcaccactgcactccagcctgggtgacagagtgagactccatctcatttaaaaaaaaaaaaaaaaaaaaagaacaagtggacataagttacacactcatgctcagaaagttccttccattccaagtaagctctcccacagaatgccggtgaacacatctatgcctgtaccactcaacatgcctttttggggcaatgatcactgaaaaccatgaataagtctcatcattgctaatgtcatgactgacaaatgcttccccacagagaatatggccactgctctgagatggaaatttgagttctaattctttctggtccactaaaaattcttacaactcagccaaatctcaactttccttgaccttagttatattattatacttacatgatgagggggctgggcaaggttacttctaaaatcctttgccatggtctgaatgtttgtgtctctcccacccccaattcatatgttgaaacctaagccacagtgtgatgctatttgagggtgaaagctttgggagacaattaggcatgagggcagagccttcaagattgacattagtacccttataaaagagggcccagagagctctcttgcccattccaccatatgaggatacagcaaaatacaaacaaaaacaaaaataaaataaataaaagataaacaaaatttaagttctatgaaccaggaagcaaactttcaccagacaaccaagtatgctgatgtcttgatcttggacttctcagcctctgcaactgtgagaaataaacttctgttgctgataaggtacccagtctatggtattctgttacagcagcctgaagggactggaagacatccttccagcttttgtgttcgaacttgaactatgccatcaattgtcaccacctcaggaatattaaatcaagtcagggcttgcaatgtgagtccctgggagtcctgtctggctgctctgtggggaagtgtgagtacctgctgtgtagagatgaccttgtggaggtagctgccctgtgaccctttgaccttcaagatggaatggacaggggttgaacctctgaataacagtgctcaaggcatttctcctcattctttttgtatggcttccagttcccagtgccccacccttactgtctgtgctgtgacctgaagtgtgaactcggctgcagcgagacctacccgaggaggaacagcctgcagagcggtgatgtagttctccagggccaggcggcggcggtcattgagcatggcttccactctggccatgtgtgtctccaccagctgctgtctctcgttggctgcttcctgttccaaagattccactttctcctggaaatgctgccatcataaacacatatgtccatggggactgaataagtaggatgaagcagcaatttcaagtcttctaaaaaagacatcctattccattttcttctagtgctaaaaagtatcctaaagactgcatagtcattccaacattgactaattctacgttttatagcttacttcactttcttgcactctccaaccctcatcaaacctactttctcattgaaaatcagtatttcataggctctctgaaggctgatttgactaataactttggataaatatatgcactcttgaaactcttatattacatattaaaaaaaaatccctctcttactaacagtacctcaagtaattgaccataataaactgttggtttacttaaggtaattttgagactggtttccatcaaaaattcaaattctcataatttttgctggagggagaagcagcagaagattgtggtgactgaaaagatgtattattaataaaaagtagattgcaagttacaatgtgagttttatggcaatgaattataacttgaaataattgggagcaaatataaggcaggatttaaacaactcaattactagacaatgattaagaacagctgaagttcatgggactatgaacaatcacacgtgaggtgctggcagataaaggtaaacctgcagacactcattaaaaagactgctggcatgtgatgtttggtaggaaatgggttcaggttttacctggataactgccttcttatcagctttaggcaagttctttgcttgacgttctgcctcttcccattctctcatgacctataaattaaggaaacatttgaatttaaaatcatcagttcatcctttgaatacagacttaataggatggatgattatgtttttcctctatttttgtcattttagatatttaaaaaatttattacataccccttcctatctgaagaatatttgacctcccactaggatataaataattaatcacagcagtatattaaacataaatgttcatatttattgcaggaatatagctttttgagtcaaggttggtctttttttaccccgagaactgacagtcatttgatttgatgtgaacaaataccaactattcatggaaggcacacattaactgaacaaggtcttccaatattaaactgaacacctaagttttactctcttatgaaagcaactgaaaccattttaaactgtatattttgactttaaagaaaatatgacattttatgtgtgtgtgtgtcatgaatacaatgccaaaaagcagtacataatgggggaagaaaaagaagacttctgctgtctaatatcctaagacctatccccctttaaagaactgatggggaattaaggccctttgagcttgccaacctaagtcatgaacagcaaggattacgctaagtccttccaaaaactccaagaaaacatgtaatattctgaatgcagcaaacatgtatttttttacaagtagcactaatttagtaaccaactgctatggtttgaatgtaacccctaaaaagcatgtgttggaaacttaatccccagtgcaacaatgttgaggggtaagtcctgtaagaggtgattcagtctctgtcctcatgagtaaattagtatcattatggggggagtgggtttgttattgtgagaagtgggttgttataaaactcagttttgccctcctcttgcccttcttccttccaccatatatgatacagcaaggaagtcctcaacagatgccagcaccatgttcttggacttccccacctgcaaaactgagagccgaattttaaacttctttttctttacagattatccaggctggggtattctattatagcaacacaaactgactaagatatcaggtgaatgtgttttgtaggaaatcaatgcttcctgctctcaactttgatgttcacctggatttccctgagagaagttcactcattaacctgatacaaaaagtaaaagtctgcacctctgtatgttgttcaaagaaaatattaacttcctaccacctacagctgccttttcaagtgtatgacaagtagaatttgtttgaagtgcaactctgaactaggtaaaatgaagaaagatcaaggaaacaaaatattggtttggtgccagatgtgtacttgcatactctgtgtactcccaaagcatgagaaaacttgattactgtattataagagcctgttttttgtaggtacttagccttaaggaatagactcttctaacatacttcaagatgggaaagaaaaagaggcttggaataaataactatagatagaagacttctatgagacaatactatatcaaatcaccatgtgggttcctaattacagattttattgtccattggcattcattctttgtatatgataggcaattagcttcttcttgttgtttttgtaaaaccatggaggaaacaagatggaataaatatttcattacacttgaaaagcatatcaaaaataatctcaaggttcacagcaaaattgggacaaatgccctgctgcaatgaacaagaatagaacatggaagaaaagaaacatattgtcccatctgctttggtgcttctaccacgttaataaagggaacctgtgggcaagggggaaatggaagaccatctttgctttatagatgagataagccttgcaatataaatatttcaatttcctgctttgggaatgttcacagtggtggtactctaccaacaattcttcaagcaaggaatctcaaaattagtttgagatagaagttcaatgttctactgcaatgtgagaactgatttcccatattacatttacattttttccattttacctcatacactttaagaaactggactttaagctttaagctgggggaatccatgaaataattaaagagatttatttagctaatgagttgcaaataagcattactatagaaattaactcacattttgattttcagaacaatttaacaatatcctatacccccacaaataaacaaatcacctgcaccatcccactaagactctactgcaaatgaatacacactatatgtaggctgaccatctccctgtgaacagtgaatttcactgtgggactgataacaagtagcattactgctgaccctgtattaagagctttacaaaatctatctaatttaattgattcctcacaacagcttgtgagattagccagggccatcccattttacgaaccaggttaaggtaccagctcgaggctatgcaggtaaaaaagggagagggaagaatataaaccaagatctctgtggctctaaagatcatgtttttgtaccctgtggtacccaattttttattataaaataaaaaattcattaggtgagctaagtttatttatatttagtgacaggagaaaggggcgctcttaaaatgttgctgcttatcttaaaaataaaaacctaggccaggcacagtggctcatgcctataatcccagcactttgggaggcccaggcgggtggatcacaaggtcaggagatcgagaccatcctggccaacatggtgaaaccctgtctctactaaaaatacaaaaattagctcggcgtggtggcacgtgcctgtaatcccagttactggggaggctgaggcaggagaatcgcttgaaccagggagttggaggttgcagtgagtctagattgtgccactgcactccagctgggtgacagagcaagactccatctccaaaaaagataagaaataaaaacctatgagttgggtcagctttcaatttgaaggacttcattttaagcatatactaaaagtagtaagtttataagtaataaaagtgctcacacatggttcagctgtagatttctatttgactagatgctagtcacgacatatagcaacaaaaatctacaggtttagcaacaaaaatctacaggtttagagttatactccacaatggcaacaacaaaccaaaatatgaaaaaattccaaaatcctctgtatttgtaagaaaacatataacaaaaactacaataaaacttaatttaaaaaaccgcacaatttttaaaatttaaaattctcaggacctggcccttgcagtggctctatggattcttataaagcaattttccactgcaggcacaaaggtatcaatttcatttggatttatcaatcttcaaagacttggctgtttcatgcagagaaaatgactactactaagtagagatttaagaggcaggcaagtttaaagttgaaaagtccctagatttcagcaccacagactatgaagatacatattgatttcaggtgtctcacattcctatgaccactggaatctagtagacaacattctctgctctgggacaacatctcttaggttatatcagatatatctgatgactaaaagatgaacaaaatctacaaaatcatgaactaagtcacaagttacacagatgtgctaaaagttaaattattattttaaagaagacctgtcacatctaaaactaacagagaatttgaaataagttttcttaataaggtcaaaaatgaacaagatatactaggagaaaaaatccaggattaaaaaaacacacattaaaaaaaatgctacagtgggtccacgatgaatgcaggtagcaggcttcatgacttgaggtctcaaggtttctatccagcttggaaagataatgcaggtgtgtccagaaatcactaacaaaaccggggagcaaatatttagaattaaatgaaaggtaagagcaatgactgcctgtctcattctgagtatgaagtggggtgtaaggaatgggtgagatgtgtcagcgtgaagaagagtgggagggcatttccagaagaactcaatgccaagggcaaagggaagcccaagatgagatgaacagacgatgagcagagtggcctgatcagaacagcagcttaacgctgtacagaaagcaagggtagcagttgagaaggaagaggtggtaggaagaccagagtcagggtacagtggtaggcgctgaaaatgacaagctgagcattcggtgtttatttttgtcattgttctttttttacgacttcatgtgcccagaagtggatttgtgagggcacaggaagcctctgaaagcttcataaagaagggagataggatgtaaattcaaatgaggacatttcagtggcaataagtatgattcatagtcctccaatgctttccgaacagtgcctgtgtctttcctaaggaaagatctgattttcttggcatcaggtgaaaacttaataattccctgtggctagctttctagttcaattagctgttaggttttcatcgtgggcagccactagaactgcacattatattccagagccaaaagtactgtgattataaggcttttttcctctttatgttattataccaaagtagatccaagtattgttattcatcttaaggcaaaacaaacaaacaaaaaacaaaacaaacaaacaaaaaacagtacctgtgttgtacctttctagataaactattagttttatgttttcaagggtagattttcttattattcaggtgaggccaagaggtcaggagatgattatcatggaaaagacagtttgttactcagctcccaagaagccggtacatgccactacatgcagggtcatatgggaagcaccagggttggtcaggaggggaaaacatgagcaagagccttttattgtggttttcatggaaagaatgagcgaagcagggtaggcgggtttaggactgattagttcaaataatggtgatggggcatgaggttgtccctagtggtctggtacctggtcctggggtgattagagcaggtgaatagtggcccagagtataagaaggtggttgggagtaaggagcttttgattgactggtttgcatgggaaagacatgctcaggggccattcatttggccctgggagggaggaatcttcctggggtcagcagggacccagatcagaaattacaggaaagattaattgtctactaaagactgactgtgatcttagaaaatacgcagcagtctaattcataaattgcatttaatgtctctcaagagattaagcatctgtgctaagacaaaaatttctcctatcttctgatatttgccacagaatattaacactaaaaatgaatggcttactttaacctgagatctttattcattcacttttatgtcctacttcttttccccccacattcactcctaggtttgtagactacaaatcagaaaagtgactggaaaataataagtccatatttgttgattgaatgaatgaatgaatgaggaatctgagcaagggctaaaatcctccatattatcaaactccaatacaacatccagtgcctggtagcagacatagcttcaattgtagttgatagtatatatggattagccatgttttagacataagttattttttaatttgcttaattaaggacctgctaaaaaaaaacaaaccaaaccaaaacaggttttttttttttttttttttttcagcaaagtataatgaaaggagtactgtactaggagcaagaaaggcctggattctaaatgttgtctctggctcactgattttgctttgtgctaaaatgggaagccactctctcgaacctctattccactatgtatcacttaggagactagatgaaataatcactatggttcagctcagttttaagtctctatgattttacagactgtaaacaatcgtaggttcacaattataacagtctgggatttaatacaaaacctcatctttactaaagagcattttgatggattttaatttacaacatgttgattacaggtactacatatacacagaataataatgccaagtacctttcttcgccagagagaatgttacagacatcatttaatttgtgcttacaaaatccaactatacctggatccttcctaggcagcatgttcacggaggatgcaaaaaacccacaaactgtgcccacacagtaaacatttaaaattagaactttacatctttaaagatcttgataaagccagcaggcctgtggggagactgaggcagaggcaagctcaggtttcccaatatcgtagggctgaatgatggaagagccagacttacctgggacattctctctcggtgcttggcctcaagcctctctttggctttctggaaatgggcatgttcattctcatccccaggtgtctcgagatacttgtcaacggcatcaggggtactggctgctgttgtaggaactataaagtagaagagaaggaggtttgagaaaaaaaagccaacaacaacagaataatccactcgtttaatagaaagccgtattttcagttatttctcagaacagagaatttagtaaagcagcgcatacaagacgttaatgctgtttaagagaacaccatgagacactgtgcagcacagtaaggatgtctttcaccactcccaagtacagaatgaaggaaaaatctttaaaatggtccattttgcaattatagcattagagttctttacgaaacaagcatgcaaagagcaaaaacagttggtgctgaagacatgtttttccaaatccccatgctttcctaaattactattttgcaattttgaaagtaaatgatgatatcatcaatatcatacactaagactcctgcagaaaccacagatatctgtaattagcctgttgtagaataacggcaccccagggaaaaggtaaatgtatgatgtatttagataactgaattacgaagacaaccttcatgagacagtatggaaacacgacaaaagatatataaacatcaataaacacatttttgaatcacaaaaggacttttctgtcttcataaatttgacaatagtcaatgaattcattatgctagttgtcaaaaagaaagtgatttctattttgaattcaactaatactgctaagcaatatttgaattgcaacatatactgctatattatgtaactcatgagccaagtgaattataatacctatacaagcaattttccaaaagattagtgagaattcagagtatttatgagcttaaaagcaaaaagaaaaaagaattttgacttaagaggaagcatatttaacataaaaaacaaaatgagacgttttcactatcttttgagatcaaatcaattgtttcattcaaaaggttattcaaatatcaccaatgttccaagtattcctattgaattattacctgtgtattacatttgggatataatatctcaaagaggacttcaatgagaagaattgatagctaagtcattttgaaactaaacttgaagttaaatacgttttctacatccttcaagaaaatgtctggaatcttaatccaaagtcttcaaagatattaactaaaaccggaaggctgttaaataattaaacagtatctttcattttaaaaagaaacattcgttttgattttttccctccacttcaatcctgattaataatcatttttcaaaaaataaaagcagttgagtgtctatccagatgttgctttcaagtggaaggaaggaggcagggcatattcctggtgcctttacacagctgcccctgtcttctctgtagcaaatgagggagtggtgttccttcttacattggcagcaacgggggaaggaaggaaggaaggaaagagtcatgtggggatttgcaattaagcacatttggatttgaatcccatttctttttcagatcagctgtgacctggggcaggaaacttaagcactccatgtttcaatttttttatcaagtggtgataacatgccgcaggacatgataggagagctgggaaaatgagataccataccacatgtaagtcatccggcagagagggtgacacacagtggagctcatacatgttagtggccttccctcctcctctgcttaatacatcctgttcaaatctcagagctaatgctaaccacgggaaagttctgatacttttattcaaagccactgaaaatgttttggtagaagagtgcaataataaagaaaaaaaagaaaaggacaagttttaaaattttaaaaattgagaaaaagaaacaaaagaaaatacaaactaacaaaaaataaataaaatagaaccactgaaaatgaattacacacaggatcacaaagtgcaacctacaggaaaagcagtatgtatttttcaaaaaatgttaggtgtagcccacataaaaaaggccgaaagtatcaaaaataagtaaattgttaatttgtaagattgaaacaataattttgaatattaagacctttttggaaaaaaggtaaatgtttttctccatagcttcaagcaaaccaatatgcaagtatttttaacttaatcattaagttaaaatgaataaatgctaaataccacgttcttactgactttaacttaatgattaagttaaaaatacttgcatttcaagttcccaacttgaaatgaacatggtatttagcatttaaaatgtgcttccctagctttagtcatcttctcatcttaactggtagagctcaaatgagaacaagttaaagtaaaagcagaaaataaaacagtaacattcttttgcatagtccaatctggcagaatgacatgtttaggcaaaccatattttatgtttgaaacaaatgaaaatgtataaatatttggggttatacctgctgatgaagatagtcatctggctgtaactgttataaccataacataagcacccctttggaaaactggaatcataaaacttactatataagaaggaaattttttcagctcctatggtttgcgaacactgtctactgtataaaggaaagaagataaacactataatctgaatcactataatcagattggcctaagtagaaatgcacttagcaacataataagagaataaccatggaacatgaatgtgaggtatgtttaataggactgaggatattaaaaaggataaaaaccttctttttaggcacgtggaaatgaatatgaatactatattaccaacttaatccattgaatccagaaatatttctgtggtaattaattttctgtgccaacttgattgggccgcaaggtgcccagattaaacattgtttctgagtgtctttgtgagggtgcttctggatgagattagcatcggaattggtgcactcagtaaagtaaatcaccctcctcaacatgggcaggaatcacccgatctgctgagggtctgaaaacaaaagggcagaggatggagcagttcaccctttttatttcctggctgcctgagtcaggatattggtcttctcttctccctggactgaaatttacaccattgtcttccctggttctcaggcctttagatttggactaaatcataccaccagctctcctgggtctccaacttgcagacaacagattgtgggacttagcctccataattgttgtgtgagtcaattctgcagaatcaatctcttcctatacatatatatcctattggtcctgtttctctggagaaccctgagcaatacaatttctcttcaagtaaatctttgttaacagtcccagttatttcccatagttgaggaagctgtgtctctttttatctttaactcaaatttttcagccattcatacaaactccccatctcaattagtgtgagtgaaattatcctatattcataccaaccagcaagccagattactgtctagtcaagcagagaaggatagcatatgctgatattgttaaatgaatttaatagttcattactactgctctgcagctggtgaggatcccggaaggagagagcaattttaaggtggagtatgtccagagagctcaacttctatttcgtgaatatccttatatcctaaagagattaaattcataggactgactaccattttgtgattatgtccacagaaggccagagacacgtgtgccctatgtcctcacccatcaaggtacttccttttgggaagggagtggggctcaaggaatgtcaggatatgtcacaggacacagaggaaacaggaagctgtatatcagcaggtcactgatatatttaaggtacttaaaacacaggtcactgtaaccacttagaaagtggaaacaaactggctttaggagggtttatttctggttttgcattttaaactaccataaagcagtttatcctgctcacagacctctgagattccacggaacctctgataaaggctaggatttcggccggatggggtggctcacacctgtaatcccagcactttgggaggccgaggtggacggaagtttgagaccagcctgatcaacatggagaaaccccgtctctactaaaataaaataaaataaaaaaattagcagggtgtggtggcgcatgcctgtaatcccagctacttgggaggctgaggcaggagaatcgcttgaacctgggaggcggaggttgcggtgagccgagatcatgccagtgcaccccagtctgggctacaagagcgaaactccgtctcaaacaaacaaacaaacaaataaataaaggctaggatttccatgttggcactccgtctcaaataaataaataaataaaggctaggatttccatgttggccaaatgataacagcctcttttcatcagagcccaccatgctaggcatgttctgtgttctcgtttaatacatgggaagaaaaaattaccctattttattgcgtagaggcaaaacactatcatttaacatacccatttgcatccctaaacacacacaaataaagtctgttaagattgggtaagccataaaaaggctgtaaagctaatttttagagtagtaaagggccaatccatccacatgctggggcactgtaaagggtttttgttgttttgttttgttaatgagcagcacaacttggcaaaacaaccatatgctttgttatgatgtccgttggcttgttttctatgaaacagctgttcctgccccaaacactatctggcaaatccttcaacagaagttgggtcataaagcagggatcaagtgaaagagcccatggagctagaatatggaggacgttctggccttgggtccctccttcagcctgctcactcatgccttctgcaagcaagctggctaggtatgttcccccctccacaaaaacctagacttaaaacgagacaaaacacagggttcaatatccttagctctaggttttgacctctagatgcctagtcattagcagcaataccaacatcacatgcataagcttttaactttttaaatgacctttgtattttagtctcctaacagagccttgaggggcatggtaggatatataggctattacctcccttccttttaatagtgatcatgtgtatctaaacactcataacaaatgaaaaaatgtaacagaaaagcagttctaattcctagtacatcactgcttcaaggtgaatatttgcttccaaatatacagtggcattttggatgactaacgccttctacataagccacatccttattctttgccaccctgggaagtcagaggtatcaaagcagctgagacagcagctctgacatggacaaactatcctgcctttagtgcgcctgttcattcttttattcctccagcccaccaacattgcagcccttattatatgtgaggcacatgggagaaaccaatgagaaaaacatgaaggccctgatcctggtggaattatattctagggaaagaaacaattaccacaagaattttttaaaagccagtaagtcatattgttaatatgtgatttgtattatggagaaaaagaggaaaaagaaaaacagagcagagttcagaaggatcgggagagctgaggggagaggggaaaggtagaccgcagtaagtgagcgaccaggcagagtcttaagtgaggaggtgacattcagatcttcccagctggctgctggaaggacatggcaggcagatgacaaaactagcacggaagccctaagagttgaagctggctggcaaattccacgagacccgcatggccagagctaaagaagcaagagaggaagtagtgggagaggcagggaagaaatgggggacatcatgtacagccttaaagccacagtaaggattctgagggaccagcgtgggctgtttgagggggagtatatgtgatggggcgttttgttgaaggatcactctggctgctatgggacaaaagtagaaggaagatcttttaagaggaaaagacaggctgggtgcagtggctcacgcctgtaatcccagcactttgggagtctgaggcgggcagatcacctgaggtcaggagtttgagaccagcctgaccaacatggagaaactctgtctctactaaaaatactaaaattagctgggcgtggtggcaggcgcctgtaatcccagctactcgggaggctgaggcaggagaattgcttgaacccgggaggcggaagttgtggtgagccaagattgtgccattgcaccccagcctgggtgataacagcgaaactctgtctcaaaaaaaaaaaaaaaaaaaaaggagacaaagatgaaggtggcttggaccagggtggctgtcacaggaggttgttgccctcagcccccttcccacacgagaagggtcagattcccttctttctctcacaccaaaatgctgtattacctcagggaactgaatatgaaaacgggagaaactgctttcacatgtgcgtgagggctcatttcaattttaatactgatacacgcatgcttgtcacaatactgccacttcacactgtgatctattctcaatacctgccagagctctgttttctggggtgaagtaacacaggttagctttcagtttattcataaatggcgatgctgcacccaacgttcctatcacaaaatgctcctccatcactggggccaagacaccaacgaaacattttccatacctgtgtttcctctgagaaaactgttagcatttgaagggaagttactttaaaacaggggaaaacctgctaatatcttcaggatgaggcagacgtcactctcctagcctgtctgaagactccttagaggataatccattaagttgaactgtacatgcactgatttccctcattttagttctgattttgtaatcattgcggagcactccatttcatattcatactaatgtggtacttcacattcatataagaatgtggggtcaaaattaaaggcactgtgaaagattgcccctatcattttgatatgcatttgtttcctcaggcttctggggtgacccataattttacagtcacaatggactcaggacacaaaagaagaaatgacccaccttcaaacagcaatgaccgtggccatctccaacaggccagaaggctgaatgtttccctaaaccaaggcttatgaatggcattcagtcgatatattaatattagattctaacaagaaaattgggttagtctcctttcatcagcagaaaagcaatttatctctacagccttggtaacagaagattaaaacaaattaagacctatataaatcattgccttatcattgaaaatgctatttgataccgacccagcaatgttgtcatttgagatggctataatttaggaaaggagacaaggaggatcatttatatatgagtgaaatataaacttgttagcgttcatgtgaaactttaatcttgaaacatggcagagctttccgagtgccatgcttattataacttaaaaaaaaagtgtctctaaaaaaaaaaaaagtgtctctccattttcctaatttcaaaaatagttaaaactcctaacgcattctacattcaaatatttatcctaaccattaagtccaagatagaggagccatttataacaagaaaatacagtttgtgatcctccagtgtaataccagactctcttaaaaacaaaataacaacaaaagaaaaaacaaaggcattctccccctaatatgcccttgtattacaattttatagtcagtgcaatcatagttggtggagaacactatcaatgcatcacatggacataaggtaataaaaatataatctatgatgtgtttactctagtcaagctacatttcttttttatgtccatggacacatactgacatgggaattttttcaaatatatgaactgaatgtgaaggaacgaatgctggcattatttttttattaacatctattctctattcagcacatcacactaaaacttaaaagcaacctcaagtttgaatctaaaaaatatatgtgaagcaatagcaataactggcgtccagaatgggttaaccttaggttattgttttttgtcaatttgtcagaagctattcttgacttcgttaatggaggcacataaagaaataacctgtcatagctgctcaacactcaatagatgagttcgaaaagtcaaaatcttcaatattgtccagtttcatataaactgtagcagtaaaaggagatggtacagttaacctctatggaggtcttaaggataaagctgatttcattttaccccagccttccagagcaatcttctcctacacttctatatttcctttatatggttatttacctctacggcatatctgggtctcaactcattaataaaattatcaggtattgatagccagtactcagattcctttgctggtgtctctcaaaatacctggcctcgcacatcctggggtcaaaaataactgctgcacagttcacaactgcaaagatacggaaccaacctaagtgcccatcaaccaatgagggataaagaaaatgtggtgtatatataccacggaatactagtaggccagaaaaaccacaaaataaaagtcttttgcagcaacttggatggaggtggaggccattattctaagtgaagtaatcaggaatggaaatacagtatgtattcccttataaattgggagctaagctatgattatgcaaaggcatagagtggcataatggacattggagactcagaatgaggaagagtgggaaggaggagagggataaaaaactacgtattgggtacaatgtacactactcagtgaaatggggacactaaactctcagacatcaccactatacacttcatccccgtaactaaaaccacttgtatccccaaagctattggaaaaaaaataaaaataaaaataaaaaaacctgctgtattaaaccaaggatcagcttgctggctaccttttttttcccccttgagatgaagtctcgctcttgtcccccaggctggagtgcgatggtgtgatctcagctcactgcaacctctgcctcccgggttcaagtgattctcctgcctcagcctcctgagtaggtgggattacaggcgcccatcaccacgcccagctagtttttgtgtttttagcagagatggggtttcgccatgttggccaggctggtctcgaattcctgacctcaggtgatctgcccgcctcggcctcccaaagtgctgggattacaggcgtgagccactgcacccagctgctggctacttttataaaagtagtattatcggaacacagccttgtctatttgtttacttattgtctattgttgctttcatgctaccactgcatagttaagtagttatgacaaactgcatgatctacaaagcctaaaatatctataatctggccttgtatgaaaaatatttgctgaccactttattaaacgatccacttaccctcttttggcaaatagctaaacaacagagcagagacataatgaacattcttttaccacaggtagaacatctctaatctgagaatctgaaatgctccaaaatctgataatttttgagcactgacatgacatcatggtggctgggatagcaacacctttgttctctcacagtgcaacgtacagaaactttgtttcatgaacaaaattatcaaaaatactgtataggccaagcgtggtggctcacacgtgtaatcgaagtacttcgggaggccgaagctggtggatcacttcaggtcaggagttcaagaccagcctggccaacatggtgaaaccctatctctactaaaaaacacaaaaattagctgtgtgtggtggcaggcgcctgtcattcattccagctacttgggaggctgagacagggggatctcttgaacccaggaggcagaggttgcagtgagccgagatcacgccactgcactccagcctgggcaacagagcgagactccatctcaaaaaaaaaaaaaaattgtataaaattatcttcagacttttgtataaggtgtacatgaaacataaatgaatttcatgttatttcatcatgaatacatcaatattccgaaatccaaaatctgaagcacttctggtcccattttagagaagagatatttaacctgtattcaaagtagatggcccttctttttaaaaaatgctgagttgctaagcaatccagttcctttcaattttagggtcatctctaattattatggctttgaagaaaaagccattcttcctatctaagcatttccagataccaaagatttagcttttcacacttgttaatctgatagaatatactggcactgacgtgacaggtagtttaattcaccatcacatcttttaatgctttaaaattgttctccctccctaggttggttggggagcaaagtgtaatcccaggttgcctaatctaatttggcagttttagttccaatggtattgcagaatgtgctaatgggaactaacatttgctactgcacagtgaaaagaacaagaatagtgtgattaagaacaatagttcaaatttggccaaagattaaatggcctaggcattcagacttctgtcttatggctcctgtctttacaacgaccctggggttaaggtggcatattccattgaaaggctgcgtggtgtgagttttctacgatttgaaaattatgagcttctgcggcaacaaacttggaacctggggatggaacttggggcctgacttgttaagttccaattcttttcatattctctgtaagtgtaccagtctgtttcatgtcatctggaccattctgatgtgcctagaaatcaatctttttccctccctcaatcctgcatggggtcaggcctacacctctgcacaaactataaggccatcaaacataatcctaaagtacaaataacctgtgtagcaagactataggacatctctacagatggttgtcctccagcatatcctgggattctaggaaactaagatgaaacagagaggagaaaggggtggtgcataggtgaaccaatgacttcaaactaagggatttgctggtttctcttctgctgccacagtagcttacattagagcaggaaaactacgagaccttcaatactatagtcaggacagcaacagcaacttccactttaccttgcaaatattgagagcttggacaatagtctaacaaattcaatttcaaacatctgtcgagaattggatgatgctgacattctaacatttcaacatgcccccaaatttgtggaaagtacacgtgtttacaccaggagagttctatctctgagtcagatgtggggaaactactactctagaacaggattctcaaccagaatgtgaccccctgggcacatttagcaatgtctagagacatttttagttatcacagctggagttgtgttaatggcatttagtgggtaggggtcaggggtactgctaaacacccatatgcctaggacagactcctaaaaattaattatttgaatcaaaatgttaatagtgctgaggttgagaaaccttggtttagttgtttgtaccacatgtcagcgcaaatgaaggagcctgagatgggacacactttggccagatcacatggtgcaatctgctgactaaaaattggcatgatgctctttgagagattaaatgccattaaggagttggtctgtttgccttttgggatgcagtctgatggagacagcaccaggaaaaaatggtcacactctcatatttaaaatataaatgaatccacaaatatttatataattttattgtctacaaatactatattttgaagattaaatgtgaaaccttttgcactgtcctaaacccaaatgggcaggtgcaaaactaatgtcagaaattaactcagctctcgtaagattctttatcccaaatgagaaagggtttttttttaatgatttgaattcctatgttcacgaataaaatgaaagctctcagccttatatttgtggtttagatttttatttaaaataacaacaataaaatatgtccctaaaattgcaatgctcaaaattggtttttatgacaaaagtttgaaacctagaaatgcctgatttatggcaaattattgtttttataatgcaaaccatcatacattttctccctaagtgtaatcttttatcagttcaactgaagagctttttctatctcctttcacatttgttatttgactagaagcagcttagactgagcaacctgtaaaaccaaccacctttgtgcagaaatatcatccaactggctctagattgttgaaggagcaaagtcaagtccaagttgcccagtctaacaggcttgcttaccttctagttcagctccttttctctgaattgagtctgccatctgaatttgacctccagatgaccatgactttttcaaatcaaatgtgcagtttgctataaataagaccacatagctgcacaggctataaataactagaaattatatgtttttttccttgtctgtttgtactagcactgcaaaacccttcacttgctgtgattgaatagtctctgtaggcagacaagaaaatatagctgcccaaagcacttcatcctcctagaatggaaaggtgtcaggatcccaaatacactgcaagtagatggagaaaattactgggaaggagaaaattacaaaagagactttcagtatctgtttggaacagtggatgatgaaagtggtagttacgtgtacagcatgaaaataaatttatcagacaatgatgcttgtttccatcagttattaaaaatggaaaaatagaattcttataaatgctaaaatgaaacaagagaaaaataatcactgttttataaaagaatgggaaagacatttaatttactgatgcgtgctctattcatggcatttaggaaaaaatgttaacattcttcatcctcttttcactgttttctgtattcttaaaatgtgcttctgaatcgcaaatgtgatttcactaaccggcaaaacaatgtcagaaccaatgcttagccatttggtgtggagtgcggccaaaacgtcattttgggtttcaaagcctggtcctgccatgttcgatggcttgggacaagtcactaagctcttgaagcctcattttttctcgtatgtacaaaaggaatgaggaaaatgcccacaaagtgttctgaagaaaaattaaatgatctgtgaaaatgctcggtacaatgcaactcaacatgcgtacctatgtcaacactatagtggaatagctagagctttttcctagtctgtcaacccacttgctgtacttacagtgtttttagagaaaaatgcttttttcacaacagcaaaagaaacgtttatgttgcagcagtacaaaccacatccttcaaaagttatacataatgtgaattattctgaatattttatggaggccattaaaaaactttatagtttaggatgcagtcttttttaaaatacctaatccttcatctataatttatcatctttaaaaaagataactggcttcatcagttttgagatgagggtttttttttttcaggataatgtacacaaatgctaattataaaatatctaagttacaactgaaattgtgcctcttcttccagcaatcataagcataaatggcatatatcatccctaacctaacactggataaatctatttctggatggaatccaaattcaaatatgagtactaaaaccacattttaaaactaaactcgtctgatattacaactgaaataaaaacaaaacataagacactgtaagtaaggcctgcagtggctggacaatgcatttctttataggaggctctttctctacttcctagtcaaaaggtgagcacctctaacctaccattatgccttctgggagaggagaaagaggggttcctaatgtctaaaagtgacccttcatgtctaaagttgaaaccgggtcttataacacacataaattgaaatctgcgtgtacgaattagtccatgtactacaataccatgaatattaagtactttttctgaggaaacaagttacttatgtattatagtctcttgttaaatcatggcatcttgatgtaaccgagtactctattttaaagatctttcttcctttcttttccttccagttttagtaatgaaatggtaacctttgctctctttcttcccaccaggcactccctgcacagcgcttccattatctaattacgcttataattattattaaaattattaatgcttgcttagaagttccactgactgacttaggcaccttcagaattctccctcatcaggagatcacctcaaggctgcagttaatttacaacccgattgtgcgggatgcgccagcccacttaccgaactggataataactcaagtctttggaacaagtcctgtatagcagcacctcctcacccctccttcatgccctgcattccaagctcccctttttaagcctttgttttttaatccaaaatttgagatggttgctttgaggcaggagcctggaccatttccccattgctagctttgctaagtaaagtcactttccttccactgcacctagcccttgttcttcagttctgcaaaagcagtgagaggctaagcctgctctcagttacactgatagcttttaggaaataaaatagtaatggcaaatacaatacaatgatgttgtccatataatattcaataaaaccagactaaataaaaaggaaattggtcagaaatagaagaaacttagtcaatgatgctcttagcccaacatctcaagctgtctggcaaaatcagatgtaattacaagcaaggtaatgggaagaaacattttactaagacaggtgttcaagaaacacaaaaccatgcaaagaaggtgatgatgctggagttatgtgaaccaagcagcatcctcctcccctcttcccttccctcaggtgaatgacaacgtacgtttaacaggatctcgggcaagaggttcctgggtagtcttgagtaaactttgggacactatggaaaaaataagagaacataactaaaaacaaaaagagaaacatgggaatgatggctgaaatgcacgagtccactgacaaaaaaacaacctaacaaacaaaatcactcacttaggtttggtccctccaacaaaaccaaaatgaacatataaacataagatctattttcgtaagaagttaacatttgagaatgctggatattttgtctctgatagtatatccgagtaacaacaggtttcttaacagaagaggatttcttgctccttttgtgccaaatatccccaattcccttcgatgcattttttcacaaaaactccatttatttcactcattcataggacagcatgtggctctcggctctggctgtttgctgaggcttatactctctacttattcttgtccacccatctaactgatcttcagcctttgccttcttcatacattattctgtcacctttcccctctaaaatcaggcatagctagcctcatctaatacatctctgttgggagcatcgaccttttgcaaaaccctcagcaaactgtgtgccacccaggacacctggacaggtgcccactggtcactcccagcccaaactgatcaaagggagagagtgttaggtgaagggatggcagtactggggtgaggtggagagaattttaatctcttgaagcaaattcatcactgctaataattaaaaccaaataaatctcttattaccaaaaactatacatgatatttcagaaaatgaatccacccagggaaagggagaaaaaagttgcaaatctgccaggaaacctctcccaccggctaaaccagtgagaatcactgtaacaaaaggcctttgttccaaaggctgcaggcaacagaattctccattgtgttcgcaatacctgacctaattgactgctttgtttgaaactgaagaagggagtcctttgatccagaagctgcaatcatccaatcagagccagaaaaaaaaaaaaaaaaagcccttgaggttatcagttcctacacctgttcacacatgggactgaagcagtcatctcattcactggcgatggcaggagaccaacaggagcttttccattacattcctcttagatcctgggctcctttacagtgggggtattaatggtgcaggcccttctgttgttttgcttaatcctaagatcttgctgcaaaacaatttatataatccctaggaatctcaggcaggaaatgtggctgccacccttgcaacacagcggagaattaggcaggagtctctcaaaaaagtaatacacagttattgagtttcatttttagttatcaagctgagctgaataattacttcttgagtagttcatacttcctactcatgaacaacaacaacaaataaataaataaataaataaataagcacaattgggaatttcacttggaagtctgttaacgacatggaagtctcacatctggtactggacctcctgagaattacctctttggggaaaatttcatcatgcacttaagtcatcatgacttcatatttttatcccccggaattatgaaaagcttaatgttcaagagaaagactttgaaaattatgttctggcggggtgcagtggctcacgcctgtaatcccagcactttggatggccaaggcaggtggatcacttgaggtcaggagttcgagaccagcctggtcaacatggtgaagccttgtctctaccaaaaatacaaaaaattagccgggcgcagtggcatgtgcctgtgatcctagctgctggggaggctgaggcaggagaatcacttgaacccgggaggcggaggttgcagtgagccaagatcacgccattgcactccagcctgtgagacagaatgagaccctgtctttaaaaaaacaaaaaaaataaaattatgttcctcgagccttatgtcattgaaagtttctcacgttaagtcaaaagttttcttctactttcaagagaagaagcagaagtttgacctggcaaatgtctgtgtgctgagctcggagggggcaagacgggcacttctaccctccggcatttgagatgcatgagctcaattcaatcacattccctcatcagcacaataaaagacatgttatgaaccaacttaaaggtattcatcacagccatacaccttatcaatgcaactcaagctgcatcagccaggcttccagtggtagacagtatctgcacaggtagtgcacatgcataaacatgaacacatatgtacacggacaaacacataagtatgcatttgcagaaacggctggctgcagaagacaaaacagccactccagctttgtttaaaagagaagcactcaaaagtccctctggattgcaagacatatgtgctacagctaggaagagaacacatccatggccatgctttatcagggaaagacggagaggtgtgctcatgattgaacatactgcggagactctgagcaattagagaagtggacagaaatgtggttagtggtagcaacaggcccattcccaagaaccaggaaaatcaatctgttacaaaaagcagagtcagtggcgagagagacgaaaggtggccaggctcgaagaagggtccacttactggcgctgccacacacggccatgcagtactcttctgtgtcaaagttgttccggttgccgccacatccgccgtaaaagaatggggcacacttcccttcagtcacatcaaagtaccagcgggagatcattgctcggcacggccccgtctcggcttgttcagagcacacctctaatcagaggagatgtggggaaccacatttagcatgaaaaggcactgtctctctgttcatgtatacacgtttacttcttttaatcctcccagtggcaacctggactggtttattaggcagcatctaccaaacatttactgaggaatttaactggccaccaggactagagatttacacctctcagagcatgcactgtcatctggtttaatgagtgcaggactcggtagcaataaaaggattccggccaaaggtgaaaagatcatttggctgcttttagatgagtatgaaatgacggaaggtatctgcacatcacaacaatcctccatcataaaaaataaacttctctttttaagaagtcaactttcatgtaaggaaactgctttggttatgaagcgaaagtttaagccctcacaaacatctgattgctttccttaataaatgattgccttaactcaaatataaaattaattgcatatattttgaatgttttccagtgttggaagctgtctgtccattgactttatctggaaacacatgtcatatctgtaaatgtgacttatactcaatgacattaacttaagaccattcatttgtatattaagatatgtactaatataaacggtcttaaattaactctgatttaagaccattttatttgtatattaaaatatgtatttatatattatacattaataatttaattacatatgcatgaagtacatctataacaacgtattattaattctgctatttaattgatatttatatattaaaaatctgtattatttgtatatatttacatacacattaagtacaactataacaatgtattatttaattatgctacttaattgatatttatgtattaaaaatctgtattatttgtatattttgtatatttacctgacccttgggcaggaatgttccaaacaataaaacgcagtcaatcaactccaactgattaatacacaccacgcactgttatacattaaaacacatcttacctgtcaacatgtcttgccaccctccccaagatcagtttcactcatccctgattgcctcaaagtcaatcagtgacccatccaattgcatgtataaagtcaatcctgagtagaattataactctacctcccatgtatatcccatttttattggaagtgaaacaacagcccaattctctctctgggtttgtgccctgcccttgctagactgacgccttagcacacacagatgtcttcttagttttactgacagaggaaaaaacacctttctaaaagatgaaagccacgcatcacccattacttccaagttaggaatattcaacagattctttttttctttttatgagacagggtcttgcactgccgcccagtggcacaatcttggctcactgcaacctctacctcctgagttcaagtgattcttgcgcctcagcctcccaagtagctgggattacccttgtaccagcacgcctggctaattttttggtatttttagtagagatggggtttcaccaggtaggccaggctggtcttgaactcctggcctcaagtgatacacctgcctcagcctctctaagtgctgggattacaggcgtgagccactgccactggtccttcaacagattgattctaattagccaatcaaagacaaggatccatcacatctaggcatggctttgagcttcacaggccagaagctgctctgtcagtaactcagaggggatatggtccctagacccaattcacttttaataaatcagggtgccagtcctttaattttggaagataaataaaattgcgaagtagatgggatacttacgtcaacaagttggttgggtttcatcctgtaagagtattgtgtacagaaatccaatttgctttgggagcgtggactttgaaagcagcagtactgagtgagatggccttaatgatggatgataatgaggttgatgctttcgtagccacgtttccatctgaaaaccacgtgaagagtgtcagatcatcttcatgtccgttgcatggcgcatttctcctgcggagtgtttgacaccttctgggcttagtgctgactgtccctcctgttgacatcatcgtgatggtagccacctctggttttaccagtactttattgcatctactgaaagagcaacgtgtatagggaagtaaaacaatagttagtccccatttgtattgacattgtggatcccatcaactatagccagcagtggtctctgctcccagagcttaccttcagttgtaacaaacatctacagcttcactttgctttccttctctgtatctccttcaccaatgtgtacatattcatgtcacatgctctttaacgtttctaagacacaacaatacccattattaatctcttactcaggcagtgttaattccaataagactgcaaggcagcagtgcctccagagcctgcactgtgccgggaattggcactgggattgcaagcaccgtggtcattgctaccaagggaggcacagaatcccttcaccccatagtcacgggagcattggcaacaaaatttaccatgccttggcaatttatgctgaccctcacattttggcattaaaaaaaagtatcatcttagagtaccaaatatgtgtcttcttatagatgtgtgccacgggcctcgcagtgaacatcacagctctgcagatgcacaaaccttgtctttatgagtctatatattaaataaaagtggtagaattttggatgggtgcaagtcaagtaatgggataaaagaatgatgatcgaaggagatgattcatgataactatgtgcccttatgtgaaacctagcaacaatttcttacttatgataaaggcacaatctccccagtccagaatctaaatggcattatattaacattttcctataccactaattaaacataatgctacattcattttattttcttctgcctcattctataacagctatgaaaccatttgttatagctaattcgtagaagccaggctaaatgagccctaatcaactagaacaagcattcagaactcaaaatccatttacatgttaattaagtaaatagtataagctacacgttgagcctacaactcttgctggagtctccagctgtaagagccttaactccttcctttcataaaggccaagaaaagagtgagttagtccctattcggggagtgttggttggttctcccaatcctgttaggggcagttggcactcttgactttgaacggcccccaagagtttcactgccttggtggagtccaagtgggcatcatgggcaatagcaacagatcccacaatactcaaatacaaaaggctacctgagataatgcggtcaggaatgggtgtaacagtgtatgttaatttaatgtcaaatacataatgtatggagaagatgtacgtgaggctggaagaacaggactgacagtgtgcttttgttacttctcaatctctaagagacagctaccttgtccaactggttctcatctgctgacatggaggatgagcagataggccttctcttaacatgcaacccctctcctggtgaaaaagagcttctcgttataattcccccaattgtcagcaaccctgattccccatcacctcaactctcacttcccaacactttccctcagggaaataatgagaacagcaacttcctacagcagtgaagctgacttcggagaggactgggaaaggaatggaacgtatcctctatcactcataattatattcctactctactacagggaaagggaatgcaactgtttgttttctctgacttttttgctaaccctttattattccagaacaattttccatgtagtagaaaagagaatcttagcctactctgggagaagctgggactgagggtagggtcagcaccagcgatgtatgatgctaatgcttttacacaaagtatgaataagcacacaagaaatggccagtgcctctcagaagtgaacacggagaagcagcagcatagacttgggttaaagcagtgttaagggattaatgtcaatttaatagttgtgatactgtactgagtgaagactatgcagggtctctttgtattaattctttttttttttttttttttttttttgagacagagtctcgctctgttgcccaggctggaatgcagtggcactatctccactcactgcaggcttcgccaagctccgcctcccaggttcacgccattctcctgcctcagcctcctgagtagctgggattacaagcacccgccacacaccggctaatttttttcgattttttagtagacacggggtttctctgtgttagccaggatggtctcgatctcctgacctcatgatccgcctgccttggcctcccaaagtgctgggattacaggcgtgaggcaccgcgcccggcctctattaaatctttcaactgcatgtaaatctacaattgtctcaaagaaaagatttttaattttttttcttttttattatactttaagttctagggtacatgtgcacaacgtgcaggtttgttacataggtatacatgtgccatgttgtttgctgcacccataaactcgtcatttacattaggtatttctcctgatgctttccctcccccaaccccccacccccccaacaggccctggtgtgtgatgttccccgccctgtgtccaagtgttctcattgttcaatttccacctatgagtgagaacatgcagagtttggttttctgtccttgtgatagtctgctgagaatgatggtttccagcttcatccatgtccctacaaaggacgtgaactcatccttttttatggctgcatagtatttcatggtgtatatgtgccacattttcttaatccagtctatcattgatggacatttgggttggtgtcaagtctttgctattgaaaagattttaaaaagcccacataaaaaaatgaatataggaagccaggcatggtggctcaagcctgtaatcccagcactttgggaggccgaggtgggcagatcacctgaggtcaggagttcaagaccaacgtagtcaacatggcgaaaccctgtctctactaaaaatacaaaaattagctgggcatggtggcgtgcacatataatctcacctactcgcgaggccgaagcactggaatcacttgaacctgggaagcgtacattgcagtgagccaaaatagtgccactgcactccagcctgggcgacagagtgagacttggtgtcaaaaaaagaaaaaaataatgataatataggaatattgatttttcagtttgcctaagagttctaaccttgtctctttacttgactcagagattggaagatttggaaatctcagtttgagaaaatttcctttacatccctctctagcaatgggatattagtaagagatctaaccaatcaagatgctcaccaagtagaagagttttagagcactgagacctgaaacacatcttcaataagccgcatctagtttcatggaagataaaaatatctcaagagagagttcaaatgcttatgtttacattttctatttttctcaatagcataatttcttccttcctaatctactgaaacttctaaaaacatcagcaaaaaacctgtttcacattaattactattatcactcagtggaaatttataaatcagccactaaatgtagaggatgcaaaattagaccttatataactaaacccaaataagattcctgtgaaaattaaaaccgtatcttcaaaatgtatactatatgtaattattatgtcaattaaaaataaagttgaaaagaaaacaaatttaagaaaaaacaaaaaactcttcatctgccttctttgttctcttctcaaaatgtaaaatactgagaaaactaacattttgaaatcatttttgaaatcaaacttattttttgatttccaatccacctttctgttcaaagtaaatatcagagataataatggagaaaatttgttcagaaaaataaaagcaagaatatttcctaaagagaaatgttagaaacataggcaaagacttacatggctatctaaggaaccacaatcctttattgatgttgaatttcttacactttcaagatcacaaatagcttttctgatattcacttatctgaattctgctggcaaggaagcattatgccttcttttgtaacaactctgctcactcttcaagacaaaatgccatttactacactgaaatgctggtgtatacgaaacacaaagcaaaatcatgtgcttctaataaaactccacgcattttatctttgtaaggtaggcccttgctgagatttgtgctcgtgtcaacgctacattccattttctaaaaatcagtataacacaaaataatacagaatctaagccagagctccctggattatacaaaatgattatgcaattcattgttcaaaaaataatgctcaaccacaaaaaattagttctgaatagatatttcaaattggagtgaaattctttgtggacaaccaaggttagaaagctgattttacatattttaataaatttagaatgaacacagttgtgaaactggcaaccagaatggggagaaaatctccactttcaaatgtacgataattataatgccttcttatgaagcaaagttaacagattagcaaataattcgctgtaaataaagtggtaaataaagaataaagctggttttagaataaagcaaagctggttattattatttcatttttaatcattgaatttcaagtattctcagcctactggaatgtatgtgaaataaaactatattccatgtgatgtataaattttaaatttacaaattttgggaaagcagtcacaatcaaactagtcatttagagagagctaggaactatattttctgaacttttttttaaaaggcaacattttatagcattattttctccatactctacaagaatatctacttaaacttcacataatacaactatttctcctttctgacagaaattccctatcttgaactctttttctccaattttaagtagagtaaaaagggcaaatgtaagacaaatataatttatttttgtaataagttacttccttaatgtaacagtggaataaaatgaaaacgacataaatattaaaatccactaagtatacaaaacttcaatatttcaaataaacgttataatttataaatataattataatatattagattataatatattatataaaaactttataatttataaatataatttatgtattatatttataaattatatattatatactatatattacaatatataattatataatacaatatacaatttatatacattttatataaatgtttacataatacatatatctgtctgagctcaatgtagttcataacaactttatttttttagcctaagttattgctgtaattctaagtattactacgtggtgacatttcatgagcctaagttattaaaatcaaacttgtattctgttgaaaaataagcagacaatatttgcatttgattctactgatgaaaaaattttaaaagccaacacaatagaaaactggttattttttaagaacgtgattttcccaattctggaaccatgtacttttaatagaaaagaacatttttcaagtgcttgtacgtagtggcaagcagtcgtcaaaaaacatgtttagaaaattactctaataaggcaataaattatcaaatatttatgacctagtaatcatattttactaaatagaagcatgtaaaattaggcaagcaagcttgaactgaagtcttatgacaaatctcacttaagctccaaatatggattgaaatacaaacaaagatgatgcaaacagctgtgcatgctaatgaaagcactgcttcagtacaagaggatggtgctaatttgtcacggaagtaactagaagatatccgcagttggctagcctttttactgaattgcgttaattctctcaggctagccaatacatctgtcattctaattatacctgacccaattctcatctctccatgatgaaagattgtttataaaatgccacctgaaggagatttacttgtaaagtatttagactaatcaggactcccgtgacggtgttagggaacactcacaaaagggtaccactgtggtttttcctcaacctttgtttcctgtttgttatgggaataaacttgctcttcactgagctgcgtggttagcgtgcaacaggctattaacaagaagctcaaaactcgggatatcatgtcctgtattggaaaataaggggaagtgctttgtcttactgaatgagagacaggagtatgctgggaaactggcactgtctagaaaaacaaacaaatagaacactcttgagttacagtgtatgccaactgccatggtataaatactcccaccattggtatttcaagctactaatggctatggcttacaaaattcctctatactgtaataattagcttttacaggctagcaggagttggctacactaccatgttaatgacaggaaataggggcacaagtgaacacatgtagggagactgtaagagtttttcggtttccttggtcttgaggtgtgaatttaaggaaagaaaagctcagtaggtagatgtctcaggattgcctcatacttgttggtatctgtaatataccaagaacaataacaccaaaggtaagaatggttttccttttcagtttcttacttcctgtctcaatgctgcaaatctgcaccatatggaaggcaggagacgctactagagtctactactcaaaataggatcatggaccagcagagtcaacaccacctgggactcaggccccccatacagactcaacaacgattgttttccaagggccttggataactcgaatggatatctcagtttgagaagcagcatgatcaaccttatcttttaaatgcaatagatatgtcaaaacgtgagacataagatttaatcattttccaaaagaagtagttagggaagaattagtaaaagttgcataggttttggcttattaaaagaagtacacatatatttgggaaaagacagatacaacaaaattagtagtcttaagattcaaatatacagctcaacaacttaatttgaacagattgaacagattgtctatacacatttattttactctgaagttctgtcctatctcaagcaacattaaaacagcttcgatacctctgccttagatccagtaccaagatcataattttcttactcatattaagactattgaaataccagacttcttagaaagctgaattcaagtggtatcattcctataatatcccagaacatcagaaatatcaaagtttttatttttacttgtaaaaataatgaagaaagccaagatcaattcaagggcttagaatatacttcctttttcttttcttttctttttttttttttgagacgaatctcgctctgtcacccaggctagagtacaatggagtgaactcggcttactgcaacctccgtctcccgggttcaagcgattctcctgcttcagcctcccgagtagctgggaccacaggtgtgtgccaccacgcccggctaatttttgtatttttagtagcgaggggtttcaccatgttggccaggctggtctcaaactcctgacctcaggtgatgcacccacctcggcctcccaaagtgctgggattacagcatgagccatcgtgcctggccagaatgtacttccttataccacttctctgtaaagaaagaattagatgatatttctgttccggtttaaaaaaaaaaaaagaaaaaaagaatgcctctagatgtaggtcatgggttggaaggatggtcctactgtttcatgtccttttctggggaagactgacatgtacacctctccatgttaactggcttcttgtcacaatctctagcaggcaaacaacctacagattccagctgggaacagcagtgtctctggttacagcacagatgctaatcaccatttgctattttataacagtggacaaggggagagtgaattccttttgaacaaaaaaaaaaaaaaacaaaacaaaactaggaaagcagtttacctccatatctcactgtctacatggcaaatatgcatacgcaatgtttcaagtcaacattttatgttgttttctgtttctaaataaagctactagactacattacacattttatcaaatacttgcttttaccttactaaatgtgtatttatcatatttgctttggcatatttttgtttattttactttttcttatacaataaaaaatgttcactggttatctacaatgtgcaaagcagtgatacagaagttagagcttacattaaaatgagaccagccgggcttggtggctcatgcctgtaaacccagcactttgggaggccgagatggatggatcacttgaggtcagcagttcaagatcagcctggctaacatggtgaaaccctgtctctactaaaactacaaaaaaaaaaaatatattagccgggcgcagtggcaggtgcctgtaatcccagctacttgggaggctgaggcaagagaatcgcttgaacctgggcagcagaggttgcagtgagccaagactgtgccactgccttccagcctgggtgacagagtgagacttcgtctcaaaaaaaaaaaaaaaaaaaaaagcaaaaaacaacaaaacaaaaaaaacacacaaaacttagctggtcttggtgaggcacacctgtaatcccaggtactcggagacagaggcaggtgaatcgcttgaaccatggaggcagagattgcagtgaactgagatcgtgtcactgcactccagcctgggcgacagcaagactccgtctttgggggatgagacacagtattgcacgggtatttctctgttcacttttttatttttatttatttatttttgagacggcatctcagtctgtctgccgagactggagtgcaatggcacgatctcagctcactgcaacctcaacctcccaggttcaagtgatttctttgcctcagcctcccaagtagctgggattataggcacccatcatcatgcccggctaatttttatatttttagtagagacggggtttcaccatgttggccaggttggcctcaaactcctgatctcaagtaatccgcccacctcagcctcccaaagtgctggggttacaagtgtgagccaccacgcctgggcttctgttcacatatctaaagctgctcatcactgcagatctcaacaccatagcccagtgttttgcaaccagagagagtctatcccctactcctcccaggggacatttttgattgtcatcacttgggggtgctgctggcatcgagtagaggctagtgatgcagctaaacatcctacaatgcacaggacaatcatccgcaacaattatctggcccaaaacatcaatagtactaaggtccagaaaccctgccatagcccaagcaaacaccagaaggattcgtgatgcattttagtaactttgcccaccaagactactgggcagcagtcaccagcacttcagaaatcctgggtaacaaatgctagtaaatttccagaacagatgcaatcataagaattggcaagcaagacttttctttgctcctatcatgaaacataagaacctaaagtcacgtgcaagcaacataaaattgccatccatattctgtgatacttgcatattctgtctagaaattatacccaataagaacatatataaatttaagaaagaggcaaccctactctcatagttaaaacacctgaacagtcttaccattattatcaactaaatatagcgtaacctttaacatttcctctgccttaatcttttttttttttggacagggtctcactgtcaccaaggctggagtgtggtggtgtgatcacggctcactgcaggcttgacctcacctgggctccagcgaccctcccacctcagcctcctgagtagctgggactataagcctgtgacactacagccaaaacaacaatttttttttttggtctccctatggggcccaggctgcttgcaaactcctggggtcaggcgatcatcctgcctcagcttcccaaagtgctgggataacaggtgtgagataccatgcctggcctgtaaacacttttttttttttaacactgtaaaagtctcaatgtttacaatttgggctgctgtcttgaaaattaagggattctcttgagcatcatttttatatgagattcattcattcttgcctccccttgactttttactcttctactaacagaatcacaaaaagtcaggcatattggaagaggtggttggaaaccaaagatgaattttcaggagggcaaaatggttaaaggctgagagaagcagctggttaggctgtaagccactctgcttttggaaactcattgttctgcaagggaactaaagatctccattcaaatccacagctttgtaacctgctcaaggaatctgactgtacttaatcagacctatggcttggctaaaaacgtgtgcccggttgggtgtggtggctcaaaccagtaacccagcactttgggaggccaaggtgggtgaatcacctgaggtcagaagttcgagaccagtctggccaacgtggtgaaacccatctctaccaaaaatacaaaaattagccaggtgtggttgcacacacctgtagtcccagctacttgggaagctgaggcaggagaattgagaattgcttgaacctgggagacggaggttgcagtgagccaagatcgtgccactgaatcccagcctgggtgactgagactccatgtcaacaaaacaaaacaaaacaaaacaaaacaaaacaaaacaaacaaacaaaaaggtgcacccagctggtgcagtggctcacacctgtaatgctagcactttaggaggccaaggcaggtggatcacctgaggtcaggagttcaagaccagcctggccaacatggtgaaaacctgtctctactaaaaatacaacagttagccaggcgcggttgtgtgcgcctgtaatcccagctactcaggaggctgagagaggagactcacttgaacccgggaggcagaggttgcagtgagccgagatcgcgccattgcactccagcctgggcgacaaacaaaaactccatcttaaaaacaaaacaaaacaaaaaaagtgtgcccatgtaaatgtatgcatgtttaaatgaacctgaacctctgagttgctggatttcttctttgaggtttgatttttttttttcttaattgcaaattcttgagttgagtacagttattgtgcctgaggcatctgcacacttttttttttttaaagcaactgatttggggaaaatatgagaaagactaatattctttaaaaatctagtttctggcctttaattaaattggactaaaattttatttttaataaatctagatataattgtattaaaatgcctttcactgattacttctgctattctatttttttttaattggtaaagccaggttctcactatgttgcccaggctggtgtcaaatgtgtatctttgtgaatatactaaaccactgaattctctctcacacacacttctatatggctctattccctagtctcatcacattttaagcaacctaattatctgagtgggctttctagattgagaccattaaactacacggaaagatgcttgtccatgtcctgcttcactctgcctctatcaaagtgtgtatcaaacacctcggaatcaatggctgccatgacatggggcacaaaataacaggctgttacctgtcacatctatggtcagtgctgacactagttctcttgacatcattagcaagcatgctacaacccgggcgagagtagaagtgcatcctctccatcttcaaaacacaaaggtaaaggcctgaggcttgctctataaggaggagccattacccttttgccctgttcccaaatactccctggagctttagtttcatttttgtacagcatgctactactgaggcctccaactgaagtatgtgagttcatgttcgggttcacagcaagttaagttcacagtttaccccaagctttgtggagagttaaatattaatcataagtaaaaatcccgttagtgaattataggataccttgtaagtgtcatgtccattacaaacaagtaacaacagaggcatgagaattaagctaagctttgtttcttctccccttgagatcaatacaagctactctgatttacttcaagtatgtattgcattcattctatttggtgctctatcacccagtaaatccctattcttcctttataattactgatacgccaacttctctgcaacatagtaggtgaaaacttttgttccgggctgagcactttctcttctccatgctgccaaaattccttcctaggcaggcctgagagactcatccctctcaaggacaatgcagatatggctagaagcaacctgagcaagccactttgttcctatctctgtgcccccagcaaccaatgccatgtctggtacctacaagtgccttgtggatattggtgaaatgtatagcaataaatcaaatggtacttctcccagattaattgtcaccagaagaagaaaaataatttaattctgccaaggtcaatcacttagcccaatataagcaatattcggatcaaaccttttagcttttatcatcacatgagacggtgaaagagccatctgtatcagtgtctctatctgttcacttaacagaagaactcccacaaggcttaaaatacctgcaagaaataaaactctatcttgaaatgcagtggcatctaatactatcttatccaattttcagctggatttaaaatttaagtgcagatatttcaatatacagtgtatattcacacaaaaaaaatttaagcaagaaatgtttcttttaatcataacataatgttctctctaaatatcagctttattataccaatagatatggataggttacatttatgccttttataattaaaagtcaacttattggtttacctttaacattcctcattagtagtaaacattagtttgctaatgtttcaaatgcaatggaggatcggaatgatgatataaccataactaagagagcaactaaggttaattgagcagttactgtataccaggaattatgcaaagtgtttcctataaattaattaatttaatcctcacaaaatagttaaatattggataggtcttattaatccctattttacaaaaagaagcaatgaggattcaaggttatttgatttatacaaatttacacagttagtagcttgtaaggcaaagatttgaatctggacagcttgagtttgtaaattgaacacttactgggcatgatggtaagcgtttaacataagttacctaaagtcattcttacaagaaacatgcaagataacattaccatctacactacacacataaaaaacaggttacttaactggcccaaggtcataaaaattctctcaaacactatactagtctatctctaaccaaaaaaaaacaaaccctacctcaaaagaaatcaacttgatatggcagtatgtgaaatagaaagaacttcacagtcaccgtcttatagtgagaatcaggggttagcaaatggtttactgaaaaggccagatagtaaatgttttcagttttgcaggcaaaacaatctcttttgcgatcctcaactctacttccaaaacatgaaaacatccatagacaatttttaaacaaatgggatgggctgtgcctaataaaacttttgtgtagaaaacaggaaaacaggctatttttggccccaatttgctgacccttgatcattactcttatttgtggacccccgatcatttttctattttttttttttgagacggagtctcgctcttgtcgccaggctggagtgcagtggcgcaatctcagctcactgcaacctccgcatcccaggtccaagcaattcccctgccttggccacctgagtagctgggattatgggcacgcgccaccatgcctagctaatttttttgtatttttagtgaagacggggtttcaccatgttggccaggctggtctctaactcctgacctcaggtgatctgctcacctcagcctcccaaagtgctgggattacaggcgtgagccacagcgccagcctgatcacttcaagtaaaaattctaaaaattcagaaatgcacagtgtaaaataatagatgaatatatgcctatatcaaaggtatatgcatttacaagggaacacaggttgaaatgaatttgtgtgtatttataaagaaaataaaaagtgtaattttgacatgagtgtagcagaaatatcctggcctatctaggtccaaattctgatttcatcacttaaccagttatgtgacccaggacaatttattttattctttttttgagacgaagtttcgctctgttgcccaggctggagtgcagtggcacaatctcagctcactgcaacctccgcctcctaggttcaagcgattctcctgcctcagcctcctgtgtagctaggattacaggcgcatgccaccacacctggctaatttttgtatctttagtacagatggggtttcaccgtgttagccaggatggccttaatctcctgacctcgttatccgcctgcctcggcctcccaaggtgctgggattataggcatgagccattgcgcccagcccaggccaattaaaaaaatttttttcggccacgcatggtggcctgtattcccagcactttgtggggggcggggggcggggggcggggggtgccgccaaggtgggcagatcatgaggtcaggaaatcgagaccatcctggctaacatggtgaaaccctgactctactaaaaatacaaaaaaattagccgggcatcgtggcaggcacctgtagtcccagctactcgggaggctgaagcgggagaatggtgtgaacccgggaggccgagcttgcagtgagccaagatcgcaccactacactccagcctgggtgacagagcgagactgtatctcaaaaaaaaaaaaaaaaaaaattcttggccttagagatcttggctttaaacggggaagtaaaatttccaccacacagcatagttacaaggtttaaagacagagaatcactgctttaaagcacaagaggcctgttttcccggctacttgggaggctgaggtttgaactcaggagtttgaatccagcctaggaaacatagcaaaatcccgtgtcaaaaaaaaaaaaaaaaaaatttaaattacattaaagggcaagagtggtgaccgtgaaaatctatatctgcaacaaaggcttcaaaaatctgccagtctcccaggaggtaaaatgctgtctgctctgccccaacgatgccttccacagtagcaaagagcctagccatcagcaggggtacaacgaatagttgctgaataaatggaacataaggaagaaatgtccagttcctctggacagggcacaattggctagattaaataaaagattatgccatttattacaatacccatttcaatcagaatttagaatttatggctcaatcaaaactaccctgatatctctggtttctgaagtacaatcccttcttgaagaacagaaaattaggagcaagtatctaaatacaccactgttgtactcaaatcggtaatggcttattccactagaccaataaccaataatatccaagtatttttttaacaaccaaagatgacaataagcccccaaaaccagatagatcttgcaatcgtgtgctcacttttatttttatttttttgagacagggtcccactctgttgcccaggctggagtgcagcgaatgtgcttacttttaaacaataattttattctactggaatcagtgacagagaacagacatcttctcatttgggtatcatcgattctaacacaatatggcagagaagattatgactacgctaaaagtgtcttatttttcttccctccatttctttccggttttaacgggttatgaaattattgagttttttatgaagcacattaaggactggtatcagtagcaatatgttggtaatgatgacaattttcttagaaaggatggctgtaaatcacattttgttccaggtactgaaacactaacactgaaaacaagattgtaagcctccctgcagtatctcatctttgcaagtcacttctaatttttatgttgaacacagaagcaacctacttgtaattagagttttacaaaatgagtaatcacctatggcgttgccattgctctcaattagggaagaaccacaagtcaccttttgtaacagtgaggaggaggaaaaggactctttgcagctgacccctttaacgttaccctctaaaacatctacttctttactggaattagctacaagcacaaaaaaattatctcgcatgggcacaactgaccataacatgtttctgttaggccccctttcccaggaagacttgcctcaattagagcttttgttcaggagtttgaggtggaatgaatggacctgcattaaagattcctctatttctggggcattaacagttgctatctctcaatgaccaggtatcttgctttcagaaggttgcttttgttgctcttcttgccaacaaaattattaacttgttattttttaaggttcatttcttttttgcctttagcctggagtgttttgtttatgaaattcttttaactgccttcgtctttctacaggaaataaaacaatacaacatctctgtgttccgtcttaatatcaaataatactacctgcaaaactcaagcaaaaagaactggactaatgcagacgataatgagaccaatttatctcaagcaaattgtcttgttctagaatatgggcctaagtttatgtggcatcctctcattgtactgcataactgatgtcactccttgttcacctgttacctcaacagtactagcatcaaaacaaaatctctttattgtctcctggaaaaatctgcagcgcacagtagcttctgaattaatatttgttaattaatcacctgcagttaatgcccatctttgccagcctggcattgaaggtctctatattttggtcccaacctaaaagacatctgctctagcttaaattggaccaatcctgtctcctaaatatgcctttccatggcaccacatttgttttgctagtcctgatgactctacagcaaaatccactggtagacacaccacccacccacacttttggctctagttcaaatgtcatgctctccatggaaccttctctgatcaatccagaagttccctcttactctcggaggcaggttctgtgttcacatttcttacaacacagatggctttgtacttctttgacttctatttcctaagagattttaacatccactagggttagctggtctgtgtgtgctcatcatccattccacatggcctagcaaaatggcttgtaccaagcaggtgctcaaaatctaatgtttcaagtaaaatgggacactaaactggttctattaaacagcccagcttgatggagattcaccaaggactttcagtcccactgcaggctgctagctgctgtaatttgtattcacacttcatttaggtttcgagaagagaagccctgaaaagctgtccttccctgctacaggcatcaggctaacaagttcatttgaccagatctgccatagttggtcctaacagttgtatgaaaaacaccctgagaaagcatgtctcagtatttgaaaaatggtggtttaaacaaaatgcgcatttactagcacatttacttatgtgctaaagtgagtaagaaactgtcattaagtagggaatgataaacttaatccatcttgcactctgttcttttttttcaaagaacatgtaaaactttcaataaattttaagctaacgctgagtgtttaattcagaataatctcaattttaaaagctcaagttaaagaaatgtagaacctcaaaaatactgtgttaagtgaaagaagtcggacacaaaagaccatgtattatatgatcccacttataataacagtccaaaaaagggcaaatctatagagacagaaagtagattagttgttgcttggggctagaggtgagtagagggcttaactgggagtgagtatgtgtgatcttactggagtgacgaaaatgttctaagattagattatggtgatagttgcacagcttggcaaatttcttaaagccgctgaattatatacttaaaagcaaatgaaacttatatgtaaattacaccttaataaggtaaaaaatgcaacaaagggaagaaaatactatagtgacaactatgaatatagttgagggagacaaaatagcccatgttaagctctaatagaacaataaatctgaaatcattaaactttagcaaaaagtgagagaaagccactttttgtaaatgctgtaacatttgtggttgacctttataagtatttgcagtacattaaaattcagtcaagtacatattcattcaatctagctctagaagcatcttttactatctgccaagcagatggcagatatgaaatgcagaactctttaaggaacaaatgcatactctttaaggaactcaatccaacagtttactcgtttctgtaacatttggtcatttaatatcaactgaatgtttgtttttatttcatggagacaagtatgacctttagttcttttagttcacaatatttgcaacacaaacattaattcaatagagaaagtctaagacattaatactatatttacttcttgaagaaagcactgccgtacttcccaataaaacaatgtaaactcaacataaatcacctctgttaaaattcatagcataaaataatgcgatactcaccaaatctttttttttttttttttttttgagacaatcttgctctgtcacccaggctggagtgcaatggtgtgatctcagctcactgcaacctccgcctcctgggttcaagcaattctcctgtctcagcctcccaaatagctgggattacaggtgcgtgccaccacgcctggctcatttttgtatttttagtagagatgggttttcaccatgttggccagactggtcttgaactcctggcctcaggtgatccgcctgcctcggcctcccaaagtgctgggattacaggtgtgaggcactgtgcctggcccaaatctccttctttaatgaaatctaatcacaactactcactcaactaagatttatcgaaactacaagccaggcactctgtgcaatactgaataaaatcaagtccttaccctcaaggagctcatcgtctaggtggtaacagacaatattatataacaaacactcactgccaaaggaataccaaggagtcacctaactcagtgtttgtcaaattagatgactacctggttgggcggagtcttgtagaattaacttgggatttgccaagcagcatatacaaggtacaaaacaaactgtataataaagatttcacattatttgaaattgtttgcttgttaaaccaaaaaaatttcacaagcataagaagccttttggaaaaaaaaacatgtttttgattggggaaggcagtggtgctagggtggatatttccaactctggtattacgctttcttttccttgggggtggggggaatccaagcaaatggtggattacctcgaaccacctcttccacagactctgtggtggtggtggtggtggtggcaatgctggtggttctctctgtggcttcttcgtagggttcctcagcctcttcctctacctcatcaccatcctcatcgtcctcgtcatcatcggcttcttcttcttccacctcagccacttcttcctcctctgctacttctactactttgtcttcactgtgaaggcaaacacaaataacagaaaaagtcaattaaacacatttcagggaaggaaaagaaaagtcgtccatatggaattttggcaatttgagaagaaacacacccaaaacttcaattcagcaggtctaagtataaatcccagctcagtgggtctgcaaaaatttttatccttggggacagttcttagtttctgcagttgctaaaaggggatgccatgagtctaaccacaggacattctggaaaagggaaaattacggagacaataaaaagatcagcggttgccagtggttcagggggagtggggaagggatgaataggtggagtagagaggatttttagaaactactctgcacgatactgtcataagtaataatagatacacagcattaagcatttgtcaaaaccaagagactatactacacaaaaagtcgcctctcatgttaaaacaggaatactggttaataatagtgtatcgatattggttcaaacgtaccatactaaggcaaaatgttaatccaggggaaactgttggggagtggggaagtgagaggtagagggaactttttgtagtttctgcttgaattctttgtaaacctaaaactgctctgaaaaatgtagtccattataaaaagtggggtggtggatatcaaaactgagtttgccgtattatgggaattacttctcatagtgcacatacaagagccgcaacgcattgcacggtagcggatactcagtatatgctggtggaaattggtttaaaaactgcaactgagagcttaaactggacacacaggtggaagatgaagctgacttaagtaaacctgcaatgccctgtggtcagggatgcctgctggaactcacacaggtggaagatgaaactgacttaagtaaacctgcaatgccctgtggtcagggatgcctgctggaactcacacaggtggaagatgaaactgacttaagtaaacctgcaatgccctgtggtcagggatgcctgctggaactcacacaggtggaagatgaaactgacttaagtaaatctgcaatgccctgtggtcagggatgcctgctggaactatttagttgcgtaccctatggttactaactgcttatgttttgtagaaaaccaaatatttcagtggttctcaaatttcagtgagcatcagaatcacctggaaggcttattgaaacacagatcacctacctgctaaatgtggtggctcatgcctgtaatcccagcactgtggaaggctgaggtgggaaaaaacctagaggccaggagtttgagaccagcctgggccacacggtgagaccctgtctccaaaaaaattaaaaaaaaaaaaaaaaaaaagccaggcatggtggtgtgcacctgtagttccagctactcagaaggctggggcgggaggattgcttgagcccaggagttcgaggctgctgtgagctatgactgcatcactgcattccagctagggagacaaagacactgcctccttaaaaacaaacaaaaaccagccaggcatggtggtgtgcacctgtagttccagctactcagaaggctggggcgggaggattgcttgagcccaggagttcgaggctgctgtgagctatgactgcatcactgcattccagccagggagacaaagacactgtctccttaaaaacaaacaaaaaccaacacagatcaccaggtgcctgtggcagtttctaatgcagctccagagtttctgaatcatgaggccttggtggggcctgagaatgtgcatttcaaattcccaggtaatactgatgctggtggtcaggggaaaatattctgagatccactgcaatatgctgagaataatggcaagagataaccagtaactcagtgaaattgggaagaggatcagaaatatttatggtattaaacatttacatgctgatgcatcatagtttgtaaaaaataagcaaatttggatggcaaaagaagggcatgtctagaacaaaattaaaaaggcctattaggaaatccttgtggaaatcatgtacctgtcaaggcaggcatggttgacagcatttgaatatctaatagtaaaagcctatcgtataccacctagcaggactagaggaatagatgtccttgatcagatcacaaaaccaatacaggagaaagacctagatgtggcagggggtttcaacctttctggggcaactaccacaggtctattcgagaagtaccatagtaatagaattaaaagctgctatgctgacattataatgtacccagaaggaaaaaaaaaagcgagagggagaaagcagaagggaattattaccacagagctgattctggccaacaaggagaagctcatcattgggaaaagtgataggaacccgggatttgtagccacaggaagccttggactcgtagtgagagcacagcattatgtaggaaatcagattccaaacacgtgagacaagcgaacactatgattccatgatctacgacaatagaaaggaagactcctccataaacctgaaaggctttcaaagtctaacaggaccgccataagtagttttgctgagagtgaaagggaaagatatgtaaagagattaatccatcaatggcaggaattctctgattacctcaggatttaaagcatgtgttacacaagttgtataaagatgtgtatgatccccatggaacacctgactctgattacgtaggatacaagaatagtataaagggcgtttataaaagtttcaaaaaaatgtgtatgacccccaagtggaacgcctttctaactctgattaaatatgatgtaaggatattaagtgaagacatccgaagaagtttagcatgtggctaaagaataaaaagaaactgattaagcagaataatttattaatagcaacttactcatatgttaataaatgaagtgttaatacagagaaaatcctaatcagttattgtaacatttccacaagactaggacgaaataggtgaaaagagaaacagaaaacactggcactgaaaatcagatgttggaagcctttatctcctcgtagaaataaatgaggtgaaataactgacttttttttttgactgcccaaattattgcacgaaagtttactacgtggggctacatttcaaaagaatccttaacagttgctcagctgccctgagcttctgcctttgcatttttctgtaggatctcactgttgtattactggtgaatcaaagaaagatgacctgatgcatgtcatcagttaatttaccgtgtttgagatctcttacttattcaatcaaatcatgggcactaactagcgctgttttccaatttaagtggaaaattcagggaaagtcaggaagaaaaatcaaaccagtattctctttaaatcatgatgtatacacgtgatcttgaaccatgactggaatgacgatgtccaagtgtaccatccagggtttggacagcaccgtgtttccaggtgggatggtgaaaacatgaccctgggtatccccaggttccttctccaggcttctttgttattacttggatgtggcccttaaagctctgaatagaaaccatgtttgtaaaaacagctgtttagtgtgatctgcattctggtatgtgtctagccgtgaaaaagagtgaattatatgcccatcatccatccctgcatctgcctgagcaatttactggcataataaccaggaacggagacacgtaataaatagttcaaccggctaaggaattaaattacttggcctaagagaactcaggtccaagttcttattaccatagctttgatttctggaattaaatttagatgtccatgaattcaattattcatttggacactatttaaaacaagagcacacggttttgtttgaataatgctgcatcttcccaaagaatgccaaacacaacaacattacaacttttaactgcagttttcatgaacagctagaaacactgaaaggaaaaaaatgacttttccaccacttcttcaaatgctggacagactgttgtcctgtggacttgttttgaaaagctcatcacagtttaaggagttgcaagggaggaacagtttatggaaatataaagctgagcatcataaaacaatttccttacaaacaatcaaataacaactcacaataaaataaacgcttggcaacatagtggaacattcataccacattcgcagactttagtggctatcaatttatagtgggtggcttttacagcttttaaacaccaataacaaacatttttacagaacaagggaaccatctgaaaatgctgaccatccccagagtatctgaatttaataaggtcaaagggacattcctacgaggaaataaatcactgatgataaaattttatgtgtcagcatgcgagattttacttggatgaaggagaaatgacatcacaaaggtgactctccttctgtttctaactaaagctgaccttgatataattccacatgcaggtgccgcctgataagtccctttacagagtgaaagattttgattcacacaccaattttcatttctgtttattaaagtcatgccaaaaaagtcaccatttgtattttctaagaaagccatatgacattctagaaatggcaaaattatagacagtaacagatcagtggcttggaaaggttaaaggcaagagagggtcgaacaggaggaacacagaggatttgggggatagtaaaagtactcagtatgacactacaatggtgggtacatgtcattagacagttttccaaactcacagaataaacaatgctgagagaatgctaatgtaaactatggactttgggtgataataatggtgtcagtgtaggttcactgattgtaacaaatcgctctaagggggacgctgataatgggagaggctgtgcaagtgtatgaacagggagtatatgggagaatctcagtaccttctgcctaattttgctgtgaacctaaaactgctctaaaacaataaagtctatatttattctttcacagtctctgttaagacggacttttttcttcttgctacagataaacagggaggaaatgacagagagaaagctctgattctcatggttatgtgaatatggactatcatgagatccaacctacttgcactgatgagggaagagggaagacaaccaatgtcagttcctgaaatgcaaccaaccaggggaaagctcagcaggaagaggttcagactcttcctctgtggatatgaaaatgggaaaaaagagtctagaggctcccagagtcagaagagagagaaaatacagtagtttttttcaagaagataaacagacggttctccttctctctgtctcaactctccaaactgccagagtctaaactggaaggtacaatggctggataagtcagtttgtccgaaaggaaagcagtttttgaaattactgctactaaattaggaaaatgtttccggggagggagggcaaagtaagaaatagccagtacttctcccgcataaaggcactgttagaagcgaaacacaaggggacacatcacctaattctatttgaattaaatatgaaaacaagcaaactgcaggcaaatagaactcaggggaaaggccagtaactggcaggggccaggagagaggattctaggggccagcaagtctctgtgttctggtccggatgctggctatctagttgtgtggtcttaaaaaactttgcttacttgcattacctcttatgtgtacttctctctaaataaatcagtaaaaaggttgaaaagggtttcttgttacttgcagctaaaggcataagcccacctggggccctaggtttaaggcctccagctttaggaagataaccacatgactggactaccaaaaattcatgactcaggcctgaggaggtggctcatgcctgtaatcccagcacgttgcggggccgaggcaggcagatcacttggggccaggagttcgagaccagcctggccaacatagtgaaattccgtctctactaaaaatacaaaaaattagctggacgtgggggtgcacgcctgtaatcccagctacttgggaggctgaggcatgagaatcacttgaactcaggaggcagaagctgcattgcactccagcctgggtgacagagtgagactctgtctcaaaaaaaaaaaaaaaaggaataaataaataaagtcatgacacagctgattaagaatgagctataaatcacaatcttgatctgaaattaggctatatcatcattcttacacatttaatgaatacttattctgagtgagacaattcacactaactgctgtatgagtaacagacatactgcagattaaacgcttcagaaattcaacagagaagtgattgttgcgaccagaggcatctgagttggccggaagtgataggtggctgtggggatgaggcaggaatatccacataatgcacaagtggaataagaagtaaataaaatataatgaaattttacacaggcactgagttttaacagtgaggaagggtaaactgcagagacacggggattcaggtattttttttctttagccaatggataaatatttgagttgaaaggcatatgtacaaattgatgataatgagcaaaaaagtggcaatgcattcattcattcatccattgaatcattccattaagtacctctctaagccaacccctagtaattcaatcaacaatattcgctgtgctttaccaagtgccagtactattccaggtagtgaagataaagcactcaatttcttggaatctatctattagttggggaggtgtaatatgagcaagaaaaaaaattatggaaaagtactatagggaaaggagatggggctaattgctaatgaatgactatgatagatgtgtgccagggatgggtagcatttcaaacagggtggtcagggaagggccccacggaagagccatgtgaactaaaaatgctgaagtcgggcacggcaaaaccaagagagtgcatggatggctgaggcaggggtaagagcaagtgcaaaggcccaggtgtgaggaagagattagcacgttcagcaaaaacaacaaagggccagtgagcttagggagtagcagatgagggaggaagtataagatctggtggtggagacagacaggcatagtgttacccagtacggttacatttcttacagcaactggaacgactcaatgagatttaagttgcaatgatgtctctggctgctgggcacagaatggtctccagggaaaacatgaatggatgctgggaagctggacactgggccaggagctaggggtacactggaaagcaaaggtggctcacaaggcaagtagccaaaggccagacactgacctcagcacctgtataaatgcaaaattactgccctgataacaattacatacagccagaagacccaaaagagtgagtgctagtgtgtctagtgaggcagagattccaggtgtctagtgaggcatgactgaaatgtgacccaaagaaggtccgaagtgaatgaagtccaggggccaaagatagctctccactaggcagggtgggtagagcatgtgcaaaggcccggtgacaggagggagggaaacctgagcacctgaaagggaattggctgacaagaacagaaagtgggctccaagaatggcaagtcagcagtggcacagagcaggtcttggcaaactgcaacccgcaacttgttcttgtacatcctgtgagctaagggtgggctttgcattttttaaaggattataaaaagaaaagaaagggggtaaaaatgacagcaatatgtgacagagattgtatgcgacctgtaaggcctaaatacggattgtaaaaatgaccatttaaagtcaaaccaacttctctcaacacatgctcctgtaaaccctgccccacttacgttagtgaattagtgaatttctaaaaaaaaattactgaaacaagcaaagagatccgagaagcactaaagcccagcttttgtgtaaaccagcagttcctgggcagaacctttaaaagacaatctctctttactctgctatctcagtacacacttagggtaacatgaatatcctagcaatagagcaacaatctaaacaatacccctgggacatgatataagacaaatccaaggagtggacagtttataggaaaactggtacagcttcttcagcaagtcagtgtcaggatataaaaagtgctattctgaatcctaagaattaaggatgtaagatgctggccctggtgccggataggatgtgaaatgcataacctgtgaaggacctttctggaactcagggagaatctgaatatggacatggtatccaatggtactaaaaatttatgttaattttgtgggtgagatggtatcatctggactctgtagaaaaatgttcttagattttagagacatatactgacatcttaaatatgcttcctatctgaacttttctttaaaatatcttggcatcataaaaagtatgtttaaagggggaaaatgatattctggcaagacttaaatttggaatataattacagtaaaaggctaaattgcttttttaaaggctatcttggaggcaagaaaagtcatatattatcaaaagcagattattgttctgacagctttatgaaccaactagaattaaggagaagcacctaaggtcataaaaagttttggagtcattttaaattcttgatatgtgaaaaagtttggttaatcagatgctaggccagaaaactgtgaacgagcaaattcctcatgtccaaaggtttagctgctactaaggatgggtgatccatatatattttgggtggagagttggaagtatatgacctttggctgtctaacaaatatttgagttccagggtctgctctggagtctagggatgctgcagagaataaagcagacaaaattccctgccttcctggtatttacattctacagggaaggaaagatataagaaaactaaaacaacgatgttacactagcacattacaaggtgacaagtgttacagagaaaatgaaagcagcaaagctaggggtgggctggggctggtagttggccgggctgttgcagtttctacagaagatggtaaaagaagatgccctgaaaaggtgtcaatgcagcaagaactatgtgcctggcatctccttccactgtgtccatacacatgagaactactacacagctataggtggtctgtgtccaaaatggctacaaagcaacctaggaaagtcacaaagtaagagaaaagcctggtccttttcttttgggggcactttgtgaagacctattccttagaaagaagagagaagctgcatgcttctgggcttctccccctcttttttgggaaaaaataattggttctgttaaggaagtgtatcagtctgttttcatgctgctgataaagacatacccaagattggggagaaaaagaggtttaatgggacttacagttccacatggctggggaggcctcagaatcatggcgggaggtgaaaggcatttcttacatggtggcggcaagagaaaaatgaggaaaaggcaagagaaaaatgaggaagaagcaaaagcagaaacccctgataaacccatgagatcttgtgagacttattcattatcgcaagaatagtacagagaagatcagcccccatgaatcaattacctcccctgggtccctccacaacatgtgggaattctgggagatataattgaagttgatatttgaatggagacacagccagtccatatcaggaagcaaaaacaacaaactctgctcctccttccagcacgctccccaaaatgcagcaataccttgtcctgccccagattcgtaagtggagccccattcctaggagaaaacagatacatctgcaccactgatcctcagtggcagaatatgccaggtatctgtccaggagaagaagccatgtggctcaggctacagggtttatagcccaaggcctcccttgcctctgtgctctgagggcttgaagtaagtagaaaagtactttaaattgtatcataaaggtaaagatgatgtagcttcttgggttagccacaacatttaggaaaagcatgttctggagaggtaagacttttagttgattttccattagtgagctaacatttttcctcttccaacaagcccactttcttgcattggtaagtattaagtatctttttttaaagtatctgtggttggttggcatctgagaaatctgtagggtcaaatatcaaatagacacccctagcacaatgccacaaatgcacaagggatgaggctatgaaatttgtgaattcttttcctttctcaaggaacgactacacttacatatactccagttaattgtatgttctagttatgtagatcctagagagaaggtctagtgtggtgattaatggtgactttccagagctcagccacgtgggtttcattctcagtgctgccacctgccagctccaatgtgactatgaacatgtcacttaggctgctgtgacttggtttcctcatctttaacatgggatggaaatattaaccacctcaggggatggtgtgaacagccaatgatgtaaataacacacttggaacagcacatgataagagttaaatactgtgcctatttactgtttttaactacagcttaaatgtatacttatgacatttcttttctttttattgctattaggttttgaaaatggtataaaaatatcatttgtttttcacaggtaatgtttttcttggggcttattattttagaaaaaaaaaaaatatatatatatatataaagagctatcctttactgggcgctatgcctagtaagttcccaactgctgactataggctcagagccctgcagagatgggatgtaaacaagcataaaacagtgttttcagtgaagtgcatattaacaataatgggctgaacaaagaatgttcattggtggagtttgggagggacagactgaagaataatctgttgaagaggtaacaggtaaactgggacatgatgaatgaatagaaatctacaaagaaggtagcaaacaggacactgtagaaacagggaatggcacccgtagcagatgaagagtgatatggtttggctgtgtcctcactcaaatctcatcttgaattgtaatcctcataatccccatgtgtctagagaaagacctggtgggacggaattggatcatgggagtggtttccccatgctgttctcgtgacagtgagggagttctcaggagatctgacagttttataaggggctgttcccactctgctcctcgctcttctctttcctgccgccttatgaagaaggatgtgtttgcttccccttctgccatgattgtaagtttcctgaggcctcctcagccatgcagaactgtgagtcaattaaacctctttcctttataaactacccagtcttggttatatctttatagcagtgtgaaaatggactcatacaaagagtgctacaggaattgccaattctcagtatggtggaggagggggtggactgcaggaagggagctgactagctgtagctctgctcttttatgaagggctttgtttcacaggctgaggagtctggaccatcatctagatgcagagcctagtagaaaagcctgaagcagaagagtggcaaggttagttgtattgcaacaaacatgagctagcagaagcatggaggacagataggtggaggagcgacagttgggatgtgaaggcggtgctcgtgaagcctactgagaacttggataaaataacagcacagaactggtgactggggatgaagggagtgagtaagaggaggaatctgatgctttgagttggagaatagttactaatggtaacagaggatacaggaggaattaagaaatggagctaatgggttcagctttgatcatggtagacttgagattctgtaagaccccgctggagaggcatacagcagacagctgaaaacaaagaacaaaaaaatctgagccactaatacacaggcactgcttttctatttccattaaataaacagtgctgcactttgttgttttttaaactaaagagctgccattcctgaaagaccacagataatagaccagatgcccactcactttctgcatggataatatgtcccactgtgataccattatttaagtagaaacaaaatctagccttatgaagtctaattataccattcctcctccttccttcccctctctctccctgcaagcataattcaagactgctttcccattcagagatctatgtgagaattttaaaacattgttgctgattagtctctctaatcaataaaagaaatctactatcggccaggcacggtggctcaggcctgtaatcccagcactctgggaggctgaggcgggcggatcttgaggacaggagatcgagaccatcctggctaacacagtgaaaccccatctctactaaaacacaaaaaatagctgggcatggtggcgggcgcctatagtcccagttacttgggaggctgaggcaggagaatggcgtgaacctgggaggcagagcctgcagtgagccaagatcatgccactgcactccagcctgggcgacagagcaagacttctcaaaaaaaaaaagaaaaagaaaaagaaaaaaagaaaagaaaaagaaatctattatcgattagatttgataaatctattattgactagagagaccaatcaggaacaatgtctaaaattgtgtatgaaaagccattcactcatcaaatgctagtggctgctaagtgtctggcattctgctggatccgaggctccaaaagggaaaaagataagctccctgtactcagagagattacattctatggggggagagaacgacaacgaaccaataaaatactaaaatgtgattcatttcagaatggaagtaaataggctgctaggattgagaataatgaagaaggggtgttttcttcagaaaagaatgatcagggccaggcatggtggctcatgcctgtaattctagcactctgggagacggaggtgggaggactgcttgagttcaggagtttgagacaagcctgggcaacaaagtgagatcttgtctccactaaaaattaaaaaaaaattagccaggtgcagcctgtagtcccagctactcaggaggatctccagagccagggaggtcaaggctacagtgagccatgatcatgccactgcactccagcctaggtgacagagcaggaccttgtctccaaaaaacagaatgatcaagggaattcattctggaaagatggcaacaaaactgaggctgaaggtgggaccttggaacatccattatagacaatgagatctgtcagcccgggggttagcaagctggggatattgacttgtgtgacactgagcaggggagagtcgggggaaagagaggcatggggtgatactgcggaggtagggaggagctgggtcaaatacactaatacctgtaaggaatgtaggaggtcaaacctgacaccaactacgtgtttgttagttgttacccgttatcaattatcctcagcatatccaaataaggcttcattgttttctctctgtgcacttggtttttaagcgtattggtaagccacgaacacaacttaaatttgggggttccaggatctgctttatgtaaataaacactctacatcctggctgctgtacagagaatggcttggtgtgggagaagaaagcagcgcatgtgtcagggagagagaacgagagcagagattagcaggatacggaaataactccagcaagaaacaatgggagtttagattagtgctggaaaagatggagataagtggataaatccagaattcataggatgtgcagaagagacgatgatgagttctaggttctcagcaataatccctaggagagggcataggaccattactgagatagaatagctttgagagaaccacattgaggactgggtagcaggggaattaagaactctcatttggacatgttaggattcatatgcctatgaaataactaggtagagtctggcctagagaaataaaccttggcctagtctacttacaaatggtatttaaagtcaagggcatggattacagcaatcaggaagagcgagccagaaagaaaaatagtataataattgtaaagagatagccagtgtcaggaatttaatggatgaaatgtcaaaacaaaacaaaatcagccaagacaggataattaaaaccacaaaggctagggtgggggtggggggtagaactggggggtgggcactcctaaagcctgcataaacaatgtgtaggaaagacaggctggaaatgacagtgacacacaggttactagacaaagggcttctgagaaatggcaaaggtaaccaattctaagaacttactaatcttaaggtgatttatagataaaagtcccatcctataaatgtctggattcttgagcccagagatattctgggtctgtctgtactggtattctgctgggcaggtaaaggggttatgaagagaagtactatcttacttgcctgtcaactaatactgatgacagagcaaaagcgtcatgcactttacagtcgtggtcatagccaaagattgcagatgtcctagacacagtatttgagacagagaatggaacatacatagccaagttactaatatacatgttgggtaagaagattcccaaatggaaggaaggtaaaaaagctctgttctagtacaaccatttgaggatagtatggagattcctcaaaaaactaaaaatagagctaccatacgatccagcaatcccactactgggcatttatctaaaggaagagaaatcagtatattaaaagaggtatctgcactcccatatttactgcagcactactcacaatagccaagatatggaataacctagatgtccaaagagactaatggatgaagaaaatgtgatgtgtgtgtgtgtgtgtatgtgtgtgtgtccgtgcgtgcatgcacgtataatgaaatactattaagccatacaaaagaataaaatcctgtcatttgaagcaacatggatggaactggaggacatatgttaagtgaaataagccaaaaacagaaagttaaacaccacatgctctcatatgcagaagctagaaaatgttgatttcatagacgtaaagagtagaacagaggatgatggaggctgggaagggtaggtagaaactgaggatagagaaagatttgttaaaggataccaaattacagctagataagaggaataagttctagtgctctacagcactgtaggatgactacagttaacagtaatatatgacataatctcaaacagctagaagcaggatattgaattttcccaacacaaagaaatgatacatgcctgagatgaatatgctgatcagtctgatctgatcactgtgtaccctgtaaatgtgtacaattattacatgtcaatttttaaaaataaaaatttttaaaaaggtaccttttaatgaacggtctatgcttaaaatgttgctaggtgtgtttcaacaccaatgagttatatctgaggttggaccataactagacgaggcacttagagatgcggtaactgtggtctcagcatcctgttccactgcacttagttccaccatcattgtattacagtaaatgcaatattgctatcctgtgactaccttgtaaacatattttcataaaaccaaagtgcttcattaccacttctgatatgtgtatgagtccttggctccaattttccaataatagtagctatacaattatgttgaaaaccatttgaggctaaccattaacattcaaatgacgtacaatgggaaacgaatgaatagtatattctaggagataaaagatcaaacctttgatatatcttctcttacttattagtagttagagtttaagatacaatatttcttctaaaaccatttcaaaaatataatttaaatataaaattgaagatcctaaaaaagtatagaagttttaaagtagaatgactttgctatttgaatacctatttaaatttctatttaaaatgtccaaaacagcccaaatcaattctaccttcatttttatagcagttttctaatcatgagacatcatactttctagtcctttttgcttccctaaaataaaaaaactcctacatatttaaattcataaataagaattatcattacttgattactaccaaaactaattttaataatgttctcaaccttatctaggatagaagtgcttaaggagccattacgtattattattgattatgattacaagacctacaataattttaaaataactaattaaaaagggaacatgttataatagccatgattatcaaaccagaggtgggagatgagtcattgagccccaaggagagtctttgtattcgacagtgtgagatgatgggtagagaagtgatttgactaagaaaaaaatcaccccagctggcgcggtgtctcacgcctgtaatcccagcactttgggagcccgaggcaggcggatcacctgaggtcaggagttcgagaccagtctggccaacgtggtgataccctgtctctactaaaaatgtaaaaactagctgggcgtggtggcaggcacccgtaatcccagctacttgggaggctgaggtaggagaattgcttgaactcaggagacggaggttgcagtgagccgagattgtgccactgcactccagtctgggcgacagagtcttaaacaaacaaacaaacaaaaaaaacatcccatgctgctggcctgctcccccaacaattccaatctacgcattttaaacaagtccactgtaaactttaccggcttgatatgcatttacaccaattagtcgttttggaagcaaataccgtgatacagattattgcaattttccccatgtttgaggtaaagaaataggctcaaaaagattatatatgagggtaaagcacattttaaacctttgaagatatttttgaagcaaagattatcttatttacttacaagtcttttctttccttgactacttggatgcgtctattacacctggtttctgtttccacccaatgtctttttaggcaggttagttctatcatcatgaaatcactgtaagtgcaatactgccctttccttcatgatgtcattcatctctttcccagtttgttatctaacacgtattaacattttagtatccaactacattaatctcatgactactagcattgaaagaactgataaaaagataaaagcaaacccttactgcctggtttgacaataagtaacagctcttcacaaaggctggcaattaggtcactaagcaaaaaatcttggaagaccaaattcgaccaacagcaaacagtggtctcaaatgtaaaagaaaacttaggttatatgctacgcttacaatagcaaattatgtatactgcttgaattactattgatctaaataaaatggtgctatgctataaagattattttcaaataatttctaatatcaaactatacttttgaatacccttggcaaatcttttccagaattacacattcctaaaacaatgagccaatccacaggcacgtgtggcctactatatgctcaacattcacttctctttaaaacaatttacatgacaaaacaaagtacaacagtgaacattcatcagttgcaccttcaaatgtctgacaacacaatcagatgatctgtgtgtcctttacttattaaattgataacaaatagaaaataaaatgtagatctgaaggaagcacttaatttttttaatttgctcaattgcaaaaaatttatttatataaatatataaaatgaattgctatattaaaagaataatacaaattaaaatactataaataataacttgactgccttacaaaatcaatttgagctactgtatttacagattgagtaatccttatccaaactgcctgggaccagaagtgtttcagatttcagatttttttcaaattttgggatatttccatacatataagatatgttggagatgggacccaagtataaacataaaattcatttatgtttcaaaaataccttatacacacagcctgaaggcaattttatacaacattttaaataatttttgtttcagaaaggaagtttgtatacattgaacacataaagtcacataattttctacgtttgctgtcatgtcagtgctcaaaacattttggattttagggcatttcagattttggattagggatgctcaacctgtattttatggtaataaaccgcatttctttaaaaatattgtacattcttggctgggcatggtagcttatgcctgtaatcccagcactttgggaggccgaggccagtggatcacttgaggtcaggaattcgagaccagcctgaccaacatggtgaaacctcgtctctactaaaaatacaaaaattagccaggcatggtggttggcacctgtaatcccagcgactcgggaggctaaggcaggagaatcgcttgaacctgggaggcagaggttgcagtgagcccaaatcacaccactgcactccagcctgggcaacagagtgagactccgtctccattaaaaaaaaaaaaaaaaagctgagtgtggaagcaggcacctgtaatcctcgggagactgaggcaggagtaccacttgaacttgggaggggaggttgcagtgagctgagattgcaccattgcactgcagcctgggtgacagagcgagactctatctcaaaacaaacaaacaaacaaacaaacaaacagtacattctagagtttaagctaatgaagactgttctcccagtatctcactccatacaaaaatatatattaaaaattcaggtgatcatggctttggctaagtggcattagtctaccacctacaattttacattgaaacactggggatactgcaaatgttacctagtaaactaaaagtgttactttgtaaacagggagggcaaaaaaggaagctagttagctcccacttgggacagattttgttcactctctacctctactcaaaggaaatagtttgaacatctctaaattattttcgtaataattgccttccttccaaaacaaacatggacttataattttgctgagttccttgtggtaagttactggtactagtttaagccacatggctcccaagtaaagccaacagtttttggcttgatatgctaatatgtagattttgaggccacagtaaaattaattaactaattaaagggttatttttccatgtcacaatggagagtcctatctaaattaggggttttacactgaagatacaaatatccagatggtttcaacaagaaattaatgtttcggtgtactattgccagagaccagttaaaatcataagaatctgtattttcttcctcttttcctactatttttaagccagggaatttgtacagtttaattaaaagatactggagggaagaaaagagtccatgcatcagtagcttaggatccttagcactgaataatccaaccctccaaataactcttacaaatgaatcctacagtatttctcattcagcaatatcctgttactggggcaacctgtgccattaggtctcagtaagcagcacagtctcattgccagatgtagctcagacagcagcaactcaagccctgcactacagaggcatctcctcttccagccatcacctgcttggaaacaaaaacagaccccactggtttggccacacatctgtaatctgcttaaggctataaaagtgttttgcttttctttttgacatacatgtagtccaagtttattcaatacaggaatcgagcatttctaaataaggacctcaaaactggcagccagttccctcaaaagaaaatgcaagtttctgctattctcctattcgtcattttcaaatgagttctcctatttcagtatagacagtcagaaagcctcacacagtcctggaagctgccaacccagcattatgacagctgcttctcaaagccatgagccatttcattaaatccactcttacttgactcatccactggcaaagatttaaagctttaatttatcttttgtatgattcactttgcggccctctaaagttgttaggttttttttccttgagcatttaatatcatttctcaaaatgcaatgcagaaaggcagctgaaagattatatattcaaaaacttgtaactccagagatacaaataaaaagatatatagtcaaatacagcctctctttctctctcacctaattttaaagacaaagtactgaatagacataaattctcatgacagcctgagctcatcaggtaaggctatgaatgtttcaacatcactagctaagtggaagaccggcatgtgcataatttattacatgattgaatgacaagttttcactaactacaaatcatgtatttgtgaaatgcaccatctataataccatctggttattattttctgagaaaagttctcagagcacaatgaccataattaaatttgcttttgactagatgtagcactgtgccacctacaaattgagcctgtgcaagcgttttatgatgactgcattgattattgttatcaagatttcaccccttggtctggcgtggtggctcatgcctgtaatctcaacactttgggaggcccaggcaggaggatcacttgaggccaggagtttgaaaacagtctgggcaacatagtgagacccctgtctctacaaaaaaaataaataaatcaaaataaattaggcaggcatggtggcaatgtgtttgtagtcttagccatttgggaggctgaggcaggaggatcacttgagcccaggagttcaaggttacactgatctatggttgcaatactgcactccagcatgtgtgacagcaagaacctgtctcctaaaaaaaaaaatcactttaatatagtatctggaacatatcaaatgctcaagaggtttagtgcccttcattacactggaggaaaaaggtgacattttgtacctctgcatgctcagatacagtttgtttttgagttggaaatatttcatacttcatcttttcttattcttacaattttcctttatttataatgtagccatccctcttctgcccatggaaataatgaaacatgggacccatcatgctatgttattagactcctgatgcaattttacttaattactgcatgtctagaatgatattccttagtttttcttttcttttcttttcttttttttttgagacagagtcttgctctgttgcccaggctgaagtgcagtggtgcgatctcagctcactgcaacctccacctcctgggttcaagcgattctctggcagtctccccagtagctgggattacaggcacatgccaccatgcctggctattttgtatttttagtagagagggggtttttccatgttggccaggctggtcttgaactcctgacatcaagagatctgccagcctcggcctcccaaagtgctgggattacaggcatgagccaccatgcctggcctagtttttcttttttaaagaccagttagttttggtgacactattaaccttaagttaacatgatgacgtaggtgtatgtgtttgatgtgaatgccaatgtgattcaactcaaatacttgttgagcacctaactacctaacttatagaaaattatgccaagtattttcctgcatcaggttgtacaggcctcataataaatgtaaattcttggtaagtaggataggctgttaacctttagaataccatcaggtcttggacacaattttacctttgagttctgagcacttctaactacttgtgggctgatattctcactttatccattcatagagaaaaagaaatttaatcgactaaaactcattctagcttgtacttaaccatgagtctgagatatggtatgaacctcgatctttttcctatattgtgttcctatgttacaaaatatttatcatccgaagaattatttcatcattagccatcaactatttaaaaactgtgctaaagaagacaaaataatatgagcatgaaagaatgatataattgcctagaaaggtgatgcaatagggaaattatcacatttttattgctgtgttcccaaagtactgcatcatctttcaagatggtttaaaaaaagtctgcatagtcccagctacttgggatgttgaggcatgaggatcacttgagcccaggagtttgcagctgtaatgcaccatactcacaccagtgaatagccactgcgctcaagtctgggcaacagagtgaggtcccatctctttaaaaagcatgataaaaagaagtctggagactcactgaatatagtcaaaaatcatcttccacatattggcaaataggaacaactgacagaaggaggcattttaccaattagataaaccagaagaagaatgaaattgatcacgtaagtaaaaccttaggctatgagccttcacatgatatcctagatgaattttctcaagctcaagaattgacaagtgagcaatgtatttctttctttctttctttcttttttgaggtggagtttcgctcttattgcccaggctggagtgtgatggtgcaatcttggctcactgcaacctctgcctccctggttcaattgattctcctgcctcagcctcccgagtagctgggattacaggcatgcgccaccacgcctagctaattttgtatttttagtagggatgggctttctccatgttggtcaggctggtctcgaactcccaacctcaggcgatcggcccacctcggcctcccaaagtgctgggattacaggcgtgagctactgcgcccggctgagcaatgtatttctaagaataaaaaggaaatatggtattctcatccacttagtcattcaacaggaaggatatcatcactcaatattatgtgacaaaaacattaaccatcattgctaaaatgatgtgacagtattccttgccattttatgatgcttatgcaacacattttatgtctgtgcaacacatttatttgataccattaggaagtggacaaatgcccaaggcaggaatctctctaaggtgattagaagagataatgcagaaaaaaagggggaaaaaaagactggcttgatcattttaatagctgtttacaaatccaaacttgaaaacattttattcctgagggaagatggctatattctctcttcaataaaattatgagctgtcaatgttttaaatatcttaaatttttacaataattaaatgaaattgcaagtataaaaaaaaaagaccaagaaatatgatgaacctaatagagatgtatttgaaatgtagaaccagtatttgtaagacggatatatttcaggttcgtgcatggcaggtgattagcagctagctgcattccaaaggataatgctcatttcagaaatccataccttcaaaactgggaaaatacagaataaacatgtgggtttaccatatttaaattcttcgtaaaattaaaatatttactatgttaactcttattaaaattgctaatagttatttctcactattcctttattcttagttctgtaaattgtttaccaaataatctaaaaatatgaaacaataataatataaacggcccactgtatctagatagtcaatggtgctggcctggttttctggtgtagttagagggcaaggtgacgtcttgccatatgtgacactccagcaatcaccagaactgatgaagtttaaactgggttcaatacggaattgtatattccaatgcacgcacacctgcatacatggccatacgcacccacacaagccaccccgagctgtattagttcatttgcatgttgccgataaaggcatacctgagactgggtaatttacagaagaaagaggtttaactggacttacagttccacatggctggggaagcctcacaatcacggtggaaggcaaggaggagcaagtcatgtcttacatgtatggcagcaggcaaagagagagaacttgtgcaggggaacccctctttttaaaaccatcagatctcgtgagacttattcacttcacaggaacagcatgggaaagacttgcccccatgattcaattgcctcccaccgagtcccttccacaacacatgggaattcaagaagagatctgggtgggaaaaaagccaaaacatatcactgccccccaaaccagagagtaacattaactaacctggccaacatggtgaaaccctgtctctactaaaaatacaaaaattagctgggtgtggtggtgaacacctgtaatcccaattactcgggaagctgagtcaggagaatcgtttgaacccaggaggcagaggttgcagtgagccaagatcacaccactgtactccagcctgggcaacaagagcaaaaacttcatcttaaaaaaaaaagaaaaagaaaaagaaaaaaaaaaactcttccaagttatacagtcttaatgaaaataagacacggtcaaaaggaatcactcctccagatcttaagcagctctttaaaaaaaaaatgttcaaagaaatagaaaaaaaaaatcatctaattatccagaaagatacatcaagttacctctcagcacacgctcaccagtgtctgcaaacctaaacctaaaagaatacatcgataattaaagattgtttcttaaaaaaaatgtgagtacctcctctgcaagaggaaaagtgtgactctacaacaattagagggtcttctaacatttcatttgctttacgaattcagcaacccccatggaccactgggttcaatcagattctgcagttccaggtgaggagcagctctgcctccagggctaggctgcctacctggctagtcttacaagttagctttccaaatgaattttcccatggaaaaaaatcttacccacgatggctggagtctgtgtattattaacattatgtacgtaattattattattaacattatgctacataatgttagtaacagtctggattatgctacattacagactgcataaataggtattttgaggtgatctgagaatatgaccattacaacactggagaaaaatatactcggtaatttacacataaatttctgaaacactacctgttttgcctatgttaaagatttacctctttttcatacctctttttcaatgaggtcataaaacagagctcatcctacaaggaatgtttctctaaatgccccattagcgatagaaaaacactcatcttctatcaaaacaagcctcattaactaccaaacaacaaaatactgtgaatcaaatattgtttccaggaaaatggtagctcgtttctccttcttcaagaattgtcacgtagcatcccctgaagatgttttaagtcaggtacgttaaacttctattctgattttacatttcaagtgtcaaaaggagggctggttcctggaacaaggaggctgccagttggcaggagcccaccttgtgtgtggatcagtgatgcaacacctttctggttttgtccacatgaaagaagccctgcccgcctgcagggctacaggaaaagaagttaaaaaataaaatggtgcaagtgacctgatatactaattatactgaatccaaaccaatttttttaaattttaaaaacaagaatagttaaaaacaataataaaaattcagtggctcagccttagaaaacattactaggttatacaaaccgtctgtcttaatggaaaaataaagagtgataagaaatttcaagtcatccaggaactacactgtccaaatatagtagtcaccagccacatgtaactatcaaacacagtgtgtggctagtatgaattgagacgtgctgttaaatgttaaaagaagtgttaagacttcttacgaaagaaagaaacataaaaaaagaatgtgaactatcttattaaatttttcatattggtcacatgatatttcagatatactggattaaataaaatgttgttaaaattaaattcacctgtttctttttactatttttaaactgtctattagaaaatgaaaaagtaaggccaggcacggtggctcaagcctgtaatcccagcactttgggaggctgaggttggtggatgacgaggtcaggagttcgagatcagcccggccaacatggtgaaaccccacctctactaaaagtacaaaaaaaaaaaaattagctgggcatgctggcacatgtctgtaatcccagctacttaggaggctgaggcaggagaatcgcttgaacccgggaggtggaggttgcagtgagccgagatcacgccactgcactccagcctgggtgacagagcgagactccatcttaaaaaaagaaaacgaaaaagtatgtggctcacattacatttgtattagacagttctttgctaaaagatgggaggctctataacagggcctatagaaaaaaaaaggcaaaaaaatttcataatgttttaagaaagtttatgaatttgtgttggtccgcattcaaagtcgtcctgggcagtgggctggataagctttctacaatatccaatcgtggaccatgaagtccttaccaaaagctatgaaaaaaaatttaaaatatacaatttactttgtctaatatttattgaggacctatgtgcaagacataccagacacataaactatagtttggattctaacagataaaaagagatatgactacaattaattggaagataagttatggtcttataagaaaaaggtaaagcaagggtagtatagcagagcaaggcacctgtaaagacttgtaaaggctgcatcttttcaggtgaacatttataaatatatagattttgacgggtcataagaagtggcactttagagttgacaaatatctttatcatacattaaccccatttgacaaaaaaaggaaaaatatttcagatggggcagaacggtgggaatgaaagcctagagaaagaaaaggtcaatggttttaggatgccaggagagtcacatacatgtataaggctgaaaatgcaggctgaagccatgtaagagacttctgaatgccctgcaagagaatttggacttttctacaggtagaataaaccatcaaatatttcctaccaactgtcaacaggattaaaaacacatagtagaaagatagtaacacatgggaaagaattatctgggaggagggtggatgaagcctgggggtgtgggggagagggagactgaaaatgcaagaaagggagaggagatgattgagagtccagcagaacataatcataaaagggaagacaggaaacaaagggatagaagaaggtacaagagttgctgaagtacaggagaaaattcaatggtttattcaacaaacacgtactgggcacctaccaaatgtcaggtaccatgttgcagaaattcacaatggatgacggtggaggggtcatctgtagagcatgagagagagttacgctgggaaccaaggagaatgaagttgggctggatcaactgctatggggaagatgataggtcatcaagacagagataattaggtgcatctagtaacattaagatcccagctgatgttacagcatgaataagaaatggaattaagtggtaaggttacatgacttgatactttagaaatcccagaagcaactaaagaaagaaattaatttttcctagctatggagaattgacaaaaatatgtttagaaaatgtgaagggtttcagccaagtcaaggatgttcaatggaataggtaagaatggttatccattgattccatcctgattagaaaggcaggcagggaaaaagaggataatggactaaaagcctgaactggggaggtgattatgagggaagatcatgatcagagaggaatatcaaagctataaaccttatggtactatttctaaggaatttcagagtctaaagcatgactgtgttcaggtactgaaatgggatgtaaatgaaggtaactaggaaggagctggctagcatttcaactgaatatcaacctggatagtgacatcatcactgaagactgtaattggtgggggtaaccatatgacccagtttgcctggatccttcagtttatgactgtggtcccagtgttctagctgatatagacaataaactctatgggggccctagtagcagattacaccagaaattaaaagaaaaaaaaacaagcatcctgtagtttgccgattataaacttacaactcctattgaatgtgctgtttggaaatctgtagctctagggaacatctaagagaatactgaaggaataagataagtgatacaatcatcacccttcgggggatgagacagcataaaatcaatgcctgaaccagatggcatttccaacccaaagattctcattttataattttatgatttgaatatagatgtttgccttcagttaagaatgagaatcaggtaagaagtaacgggactaagctccctaagaaaaagaggcgaaaataggtttctttacaatcaacaaatcaaaggtagttaaaaaaaattaacaagcatttattaatgcctttgacttccactatgaaggaaaagaaatgataaaaggccaaaaaaaaacccttacacatccacacagagaacgcccaaaatctcaaaccaaacctttaacgaaaattcaccttaaactaatgactgacaatcccagagagcatttaaaaatatttttaaattaatgaccaaaacagaacgccattattatttcaactccctgttagaactaccagtaacctatgatagttatcagtgggattttgatcccaagtttaatattaaatagttaaaattaactctgtgatgggtgactgatattattaattcaacaggatgccataaaaattcatagttcagatttttgcataacagcagactctgatgggagtgggcagagaccttttcagtgataaacagaaagattaatttacaggatacaaatactccatacaagatgtttcagcatctctgaggctgaacacaaaggccaccttacctcccatctgcatagtctgtgtctgctccgccccaccagacatccgagtcatcctcctccgcatcagcagaatccacattgtcactttcttcagccagtgggcaacacacaaactctacccctcggaacttgtcaattccgcagggcagcaacatgccgtagtcatgcaagttggtactcttctcactgcatgtctacaaagtgtaaggagaaaacagtgagtggtagagtagatgtgtttcattgtaagaaaactccacataaaataatcaacatgcagacccaatatattaggaaccaatttcacaaaggaaaagattatttgctttttgagtgaatttacaacaggattttttttagcatgggttacactttggtactctttttattcttgtttattatttatttaataagaccacgatgttatataatagaggtttatacgaacaactggaatggaaactaattgggaaataagatgtagcagtctccactggtgaacagataccagagaattaatgccttctggcttaattcgtgtatccagaaattgtgcgcattccaggtagatccccagctcactcctacctcccttacagatggaagtttatctcacatggacctgccttatcctagaaattctgactctcttggttcactttcagagtaacaatcctgggaagagaagaaattatcccctgcagccactaagaatcagaacttacagtcattagagatttctccttgaatgtctttttgcttttctgggatttgctaaatttgcacaaatctagattagcataaagttctgagagcatccactagtgataaatgaaggatgaataattcaagacataaaggtagacaatgaaaatattacagactgtattttgaccttatgggagtcatttccgtttcttagagacaaaggatttttcttttgaaaacacagaaggaataaaaaatgaggttatcaaataggtagctggacttcaaattatttggtttgttttcttaaactcagcaagctcttaaacctccaaaacacatttttacataaaaaacattttattctacagtggatccaaatatactattttataagaggcataaaataatactaaatcttcagtggtattttctgtctaacagctataaagctatgatacaatggttaagctaagctagatcagatttctcaaccccagcactattgatgttttggactgcctaattcttgggggtggcgggtggttatcctgttgactgtaggatgtttagcagaatctctggcctctgggcactatcagatgccagtaacaccactccctcaagctgtaataacaaaaaatgtctccagacatgttccggtgagggacaggggatcaaaattgactcaagtgaagcactatgagctagataaaggagcctaattctagttagcctaagactgatcttgccacaaataaacctatataaatttattaggaaacctatcaaggggacacagcagctgtgaaggtggtcttaccacacagtgaccttttcatgctaagtatcttacatcttttattggcttagccaaaagcagaggttaaccaagtgctcggtcagactcaccctgtggaaaaatcaagatggtaggcatggcctgctgaatataaaactggatggtataactgagaaactgaattctaactggagctttcaggctggtataaaaaagctacttcactgttctaccactgtattcactaatagataacaggggaaaaggctaaattattaaaaaattgtatatgacaaaagaaaacaacaggtgcataaaaataatctgaagggtaaactttaaagttataactattagagattatatttttaagttataaggcatggcacagacaacttatatttttaagttgcgaaacacggcacaggcacataatgaatctagttcaactggccctatttttgactttttaaaaatattcatggatggggaggctgcgcatgtgtggggacagggggtacacgggaactctattttctgttcgattttgctgtgaacctaaaatcactctaaaaactaaaatctgggttacggatagtagcactgggtttttttcttaaataacttatcaacatagctgttgcctcaaaatacccctaaaatgccattaagcacgtccccaggaaatcttcactttgcaataagaaagaatttatgggctggtacctctttggcgacggtgtgccagtgaagatgagtttcgcaaacatccatcctctcctggtgtaagaatttgcacttgtcaggaacgagaagggcatcacttacaaactcaccaactgaaagaaaggaaaaccacttcccgtcattccatctgtatcacagtgttcttaccgcagaagacatcaaggaaagatagacttcaagacaagttaaacagccttttaatgcctaagcaacccaatcaagaccctactacctttagaatgttacgtctggcctccttaagcaactccgtttcttgccacttcaagtttgatggttaaaataatgcctaaatgctgcaagtgaaattgtcccttaattaatctgaatttcttgcttcaaaattaatcctaaaaaagctgcttaactagagaaccaattaccattctactacaacaggggagtaaaatataaatattgacattgtctaggtaagcatttgagcagaatcaatataaatccctacttttctttcttggacattttaatctgcttgtaagtaacagaaattttagcatttttctacttcctaagcaaaaaacccaaaagtgtattttatatatatgtttacataacacacataagagagagagagtttaattcagtttattctgaaaactgtccctcagacttttgttaaatctttaaagaaaatgtatattatgcaaattatttctaggcatttctggtattgaagatataaagatattacataaagtcctacatgaactcagtctaatgaaggtaaaagatggataattaccacattatatgtaagctgtaaacttaatttttgtttactgcaatattcccagcttttagcacagattcttgcacatagtaggcaataaatatctgttaatgaatgaacaagttaaattctgtaatagagataaggaaagtgtcaggccagtatcttgggtgcagtgggaaaaacctcaaagaagaaacaatattcgagatgaatctgaatggtgagaagtagtatgccacatgggaaatgaattgaacttccataacgtaaggatagactctgtcttgcttgccattatacccccacaattcctggcctagttctgtcaaacatcaagaactctattatagaatccaaatggatggatggatgggtagcaaaagacccttcaaaatgagggagcctcctgtgcaaagacagagtaaagaaccagcaaggcatatttgcagcccatctggatatgggtggaagcagaaagcaagtggcaaagggagtccagaaggaagtagcactggggaagcatgctggactccaattttaaagaggcttaggttttggatgccattttggaagaagcaacataggccaaaagtttttttttttttttttttttttttaagatagactctataattaagtgaaggatagatcagcatagtgaaaccatgaaagcagggagaccaccaagtaggtcactgtggtccttcaggcaaaacatgcaagaatagacataaacccacaactcccacggagcaaggaatacagatcgtccacacagcagcaaagacaggaatgaatgtctttctttcatagtacgctatagggcattttctgaaatgcaacataaagagggattaaaagccctaagaaggggaaggaagtaacttttcattctcataaaagggtttaaactttagtctgtttctagctcaaacatgtaagatgtagcatgatactgaagtacttatttcaataagtactatttagataaaaatctaagcaaatcataggggagaataagcactgtatcttgtcattccttaaatctttaaaatgatcaatgatgcccatagcagtatagtgtgtgttgcagggaatgcaaaaattatgagacatggtaccccaaaggctgcaggtgtcactttgcagggaagaaaccagtgagtactgagcacacaccccatgcagctccacagggccacatcacgggttcttttataaacctcacttcccaggggaggaatctccgccaagaaacctaaggctacctaactcaggagattataacctagccccagagataagcattaagatataaattataaggaaagaaataacatgataatgcaaatgataccacatttctcttttacatagaatgatataaaacaaaacaaaacaaaacaaaaacaaaaaacacaagaagacctggagaatggaaagtaaaggtaatctcatccaaaacaaatacaccattcccaggtggatttctcagggtttctgagggctctcagggtttctgaggtcagggactaaccctagctgcttggaagaatacctgatatctgaggcatcccaattttctaggttacaggaggccagaagtaccctatggcctgaagatgcccacctcatctgtcagctctgctcagtcatatttgcaaatgtccaaactaagaagtgatgcttttctatttgacaagtaactactggaaagattaaatgcctgtcatgtacaaataggtcaaagagtttaaaaaatctaatgctggcccaaagctactaaatcagttcgtgagaagagccagagcaggtatcagatacactcgaccttggcctgcaagagttcttgggggcataaatcagacagtaagtgccaaaccacaaaaccaaatcatcttgttttatctgcccttagtcaatctgctgacgactagattataatgcaaagctaaagttaccaaaacatatttacttattcaccaaaaggacatgtactgcattaatctttttgtttgtttgttttcagacaaggtctcactctgtcaccctggctggaatgtagtggttggatcaatggctcactgcagcttcgacctccgggggtcatgcaatcctcccacctcagcctcctgagtagctgggactacagctgtgcaccatcatgcccagctaattatttcactttttgcagagacagggtctagatatgttgcccaggctggtctcgaactcctaggctcaagcaatctgcctgcctcagcctcccaaagtgccgggattacagacatgagccaccacgaccagccagtctgaacatttttaatgaggagttggtaaacaagcttttcttaaaagcctgaattaattaaaagttgccttggatattaggagttcattagctaaggatgttactcttactttcatctggcagaaaatctatccaagagaaccatattcttgaacttgtgtttaggacagaggttggcaaactactacttgtggaccaagtctgcccacccaccacccccctgcccccaacacctgtatttctgcattagactgactataacaattgttcattatgtttataagtggttactgaactttctaacttgcaaaacatttcatttgatactgccaagatggtcttagcttcttatattgcacaaagctaagaaatatgtgtccctcaaaatgagaatggttttttaaaggattaaaactggttacttaataagctctcaggactaatggcaaaatagaaacctcattgtattctaacattaaaataaaatttagcagtggacagcactgcttacattacttttaaaatttgatgaaacatgttagaaggttacacatcagaaattgtaagcgattcaaccacaaaaatctgtttttaaaaacttttaataagcgttaagagtgctaaaagtataatgaagcctttttcaccaactggcttagcacggtttatattttctctttttaattaaaaaatattgtacttaaaaatctttgctaggacagcagttacatggaaactgtactttctactcaaacttgctgtgaacttccactgctttgtttttaaaaacaaagtttattaattttaaaaagcctatgatcgtatatacctggagtttctctccacagccacgtataccttatttttataaatgcttctgcttatttgctttgatctttcaggtaaaaagagttcttaacagaattctgatgtaagagatcaaagactaaaacaaattaaacatcataatgagaaatcatgttcctgtttacagcaaactttaggcaatttggcaccatttatttcaagtggataaattcatcaatatacagtatgcatgtttattgagaaacatacaacctggtttcttgctaaaacaattcacaatttatattcaaaacgcatgtcacacaccacacacacacacacacacacacacacccaactgaaagggtgttttcaaagctaatgaacaaaatctgggtctggcttcttggctatgaagtcttggcaaggtgaacaaggatggcaaattcaataggagtctgcaggcctcaatctgctagctctttggtggtctttgggaggactgtctagctcaaattacctcattttgcagatgggaggaaaagagctcaggtcaagtgacttgcccacagagccaactggcagaagaactagactgaaaatccaggtctccagttctccatccaagagtggtaactcaactcactcatttaaactctgttcaaaatggttcatttggcccatttcctttggcttttacaaaagtagttcacttttagactgtgaagtactttaatattataatctacaatgtggtcaatttgacaataaaactagacttaaattagctagcaagccatatagaacagctgggaatgcagtcagcggcagagaatagaccacatgtcaaaccgtggcttaaacacacggtaggattatgtatctcacctaagaagtgacactgaagctagggccactgcagatattccatgatgccatcagggaccagcgtattcctatctttctgtactgccatcctgagcacgttggttttatcctcgtgttttatggtcacagaaattcaagactctgtgtccaagttccagacagaaggcaggagaaacaagacaaaggtgaaaggttttctgttgttgttttttcctctaataaagctttgctgttacttgggagggacatactcctcagcaaattccactgaggccatatgtgccattactgtgatctggtcacatgcacctgcaagggaatctgtgaaagtattttcagcagagcacattgtcaccctgaacaaaaaaaatctggaattcttttagaaaggaaaaaatgggaatgaatatcaaacaggcgagtagcagaggctcccacactatggaatttaaagtatatttttcgatttctttatgttgtcttttcaaaagacagacagaattccaggaagcaaacagaattcagagtaaaaagtactgcaactaaaaccacagtaacttcccaatccatgacattgggaagaatgagaagggaaagatgtatcaaaactgactctgctgccaggatggcggcacctgggggtgtcatcccagctacttgggaggctgtggtgggaggatcacttgagcccaggaatttgaggccagcctgcataacttagagagaccctacctctaaaaataaatgtttaaaataaagacattaggccgggcgcggtggctcacgcctgtaatcccagcactttgggaggccgaggcgggcggatcacaaggtcaggagatcgagaccatcctggctaacacggtgaaaccccgtctctactaaaaatacaaaaaattagccgggcgtggtagcgggcgcctgtagtcccagctactcgggaggctgaggcaggagaatggcgtgaacccgggaggcggagcttgcagtgagccgagatcgcgccactgcactccagcctgggcgacagagcgagactccgtctcaaaaaaaaaaataataataaagacattaaaataaaaaaaaaacagactgctgaagttttgagcatcagagtggggttgagtagattaatgtaaaagattctagagccatacacaggttcttcaaggcacagattatttgaatatcagattaaaagacaatatttctatgaactgctggggactaaaatgatgttggccagaatcatgggaatgaaaggccaaaaatgcctgaggtctttggacttctgcccgaggtgtgccctctcttcctcatctctcaagaggtaaagatgattcaagaaagtgggggaaatgttctggcaatgtaattactgtaaaatgccaaagcctcggtttccttgtgctatgggcccagatctgccttgtgaagataaaacaccagtattgttagtaactctgaactgtgtgcctgccaccaccctcaatacttcacgtgcgtcttctctcaccgtcctcagaaccacaccaaagcagctacaatgatttcactttataagagaaggcaagggccgggcacagtggctcaagtctgtaatcccagcactttgggaggccgagacgggtggatcacaaggtcaggagttcgagaccagtctggctaatatggtgaaaccccgtctctactaaaaatacaaaaaaattagccaggcgtggtggtgcatgcctgtaatcccagctactcagtaggctgaggcaggagaatcgcttgaacctgggaggtggaggttgcagtgagccaagatagcaccactgcagtccagactgagcgaaagagcgagactccgtctcaaaaaaaaaaaaaaaaaaaaaaaaaaaaaaaaagagagggtgagactgagagactatgtaacagtccaggtcacatagagagtaaatggcagaactgggagaattaaatgaattaatatccctaaagtactcaactagtgcccagaacaaagttgctcaataaattatattaatagtatccttctccccagtatctatctcatcaaccacagtagtttctcataataataatcatagtaatcaaaacagcaacagctactcttcatcattcactaatcacctatttcgcacctactgaagacactggggttttatatgttcattgcaccatcaccacctacttgtagccccacagagatgacatggtactgttttacatgtgagtactgcttatgatggggtgaatacatgacagcaatcaacacagcggggtggagtccctacgactggagaagcagagaatctgagtgatcaactctttcaactcttgcaccgagtgctggtcctggctgggagggggtgtttcctaaatcccctcttgcagccactgtcctttatccactaactcttcactgcatacttacaattatgtctcagtgctaagaatacagcagtgaacaaaacagataaaacgatatatgatcctagcggggaagcgataaaaaatacagataaaaatacagtgtctgttggatggtaataaatgttacatagataaagcagagaaaggggtggtttgtttgttttttctgaggggtgaaattttaaatagggtggtcagggaatgcctacttgaaaatatgacatttcagtgaagacttgaggaagtgagggaacaaagtattcagaatcaaagggaagaatattctagccagaggaagcaacaagtattacacaaagtcttgaggcagatgcatgcctggtgaactcacagaagaacaaggagatcagtgctgtcgtggaggaatgatgtggaagagatcagtgggcaagcgagtgagtgacagccaggacaggacagggacagctgactgcacggggccttaaacattgtccaactctggccagtactcagagtaatgctggaaggctctggggtggttttctaagctaattattcttgccctagggggtcaagactagaagtgagaagaccaggaagggggctctggcattaatccaggtgggagatgacaatgacttggaccaggatgagagcagtagaggtggtgcgtgttctcagattctggatgtcgtctgaaggtcagatctaaataatcaaatagaaaggagtcaagaatctagcttgtttctattccaacagctagaagatgctttatactgaagatgatggaaaagtctggacaagactttcctaatttttctgtgtagatgtgtagacaggtagaacttttgagaattatgtacttactaacttgtatacactagatatgtgtatatgaaaatgacagctacagataaatgttttcttaagtgattttttattttaccatttcagactcttactccacaaatttttttgtcttgaatgtgctcattatatgctatcttttgtaactttcacattaacaaataggctgggaaaattttcctgggaggcatctgtactcaagagacgggacgattacttcacagaaacagccaaacatttctcaacaaactttccatgtgataaaactgttatggttttagcttcagagtgtgggcagttactgggttctcaaagaggacatgagggtgaattacacatccttttaaaaagtggctgttgccgtcaccagcatttcactgtaactattaccggataatagtgagaactgacagatgggattcttcagatgagaactatttgccagatggtaggaactaaatggatcaagataagcaaaaaggcaaaagaagtgaaaactaaaagttttacctaaatcatctctccaacttttccaagtgcacagatccagcctcacatacgtaccatatacacacacagatggcagagtgagtataagacagaatagtgctggccgggagtggtggctcatgcctgtaatcccagcactttgggaggccgaggtggatcacaaggtcaggagtttgaaaccagcctggccaatatggtgacactccgtctctactaaaaatacaaaaattagctgagcatgttggcgcgcacctatagtcccagctactcgggaggctgaggccgaagaatctcccgaaccagggaggcggaggttgcagtgagccaagatcacaccactgcactccagcatgggtgacagagcgagactctgtctcaaaaaacaaacaaacaaacaaacacacacacacacacacacacacacacagaatagtgtttaacccaggctctgaataacactggtcttaaaataataaaaatagtgcaaaggatttactttaaaaaagagaaaagaaaaaaaaaaccacgggaacaaaataagtatttatggccaggcatggtggctcacacctataatcccagcaatttgggaggccgaggcaagtggatcacctgaggtcaggagttcgagaccagcctggctaacatggtgaaaccccgtctctactaaaaatacaaaattagctgggcatggtggcgggtgcctgtaatcttagctactcgggaggctggggcaggagaatcgcctgagccggggaagcagaggttgcagtgggctgagattgtgtcattgcactccagcctgggtgacagagggagactctgtctcaaataaataaataaataaataaataaataaatatttgttagcagtcttgcagcttttaaaaagatccatataggtgtgggttaacaaatttttttatattttttattttttatttttttaagaaagagtcttactctgtctcccaggctggagtgcaatggcacgatcacagctcactgcagccttgacttcctgggctcaggtgatcctcccacctcagcttctcgggtagctgggactacaggcacatgctaccatgaccagcaatttttttgtatttttagtagacatggggttatgccatgttgcccaggctggtctcaaattcctgggctcaagcaatccacctgcctcagcctcccaaagtattgggattacaggcatgagccactgtacccagcctgggttaacaattctgatacggctacgcacatatactgaaactgaacaattaagtacatagatggtggatggagtgagaatttatacataaccaaggaggagagatatagtgtccatgtggtaatacgttagagtaggaaacatccggatgaacttgtatttagcttaatatagactagatattatagcttaatataaatacaactagttagctatagaaatatttatagatctgcataacataagggtgaacatggacaaatacattgccttgctctatcaactgagaagtcttaaaagcaaagaaactccagtggcaacgagcatccttaacatccagattttaatactattctccaataacattactctccaataaaaggaacaagggctccttggaggaacagctgattctaggattagggctgaaaatatgcaagatgagactgcagcatcttgtaagaaaaaaaaaaaagaggctatgtcaaatgagcataggaaccaagtgaaagggcttctaatagctaaagccggaataatttgagcaataaaaattatgaagtagtgctggattagaaatcaaagtacaatgtaaatatccatgagtctaaatgactgaatgaatgaatacataaataggaaaaaagagacaaatctcctgcgcagaagaattccaaataatttatgtagatactctgccctcaagaaaatgaagcataattctctgctccttaattgtgggctgtgcaaactgacttccttccaaagagtagagcacataaagtgggaagacgagtaattttcaagtggagaaactcaacaaccaccacctgagccaggtgatcaaggtcaatgccaacagggctgtatcatgttgataaacacgtacccttgatatgatgtgatgaaatgggcattttacctctgtggtcttccttcttaaaaccaataaccccaggcaaagcatgagaaaattcccacagaggggaatcctacaaattatctgaccaatacaaaacctttaaggttattaaaaaactagagaagtataaagaaactgtcatagccaagaggaaaggaggctatggagacctgacaattaaatataatgcgccttcctggatggcatcctggaacacagaaaggacattagacaaaaactaaggacatctgaataaagtatagactttagttaataaccatgtatcaaaattggtttactgactgcaacaaatgtaccatattaatataagatgttaacaatagggaaaactggatgcaaagcctatgggaactctctggactatcctctcaattttcctgtaaatttaaaactgttgtaaaatataaagtctattttaaaaaaatttaatggcttgatataaaagttcacataataaggtgtcatgccaaactcctactgactgcaatgtggatggcaccaggttcaagagccagaagaggcccagagctagtgaaccgtatgtctcatagggttttactgggggcttgcatacagggtagagagtccagtggtggtgggttggacagaggaaccgcagccgcttgcaaaaggcatgtggtctctacagcattctcatttaacaccctccccctaacaatctccacctggcaacttccacttaactcataacaaagggtctcaatccccggcgaggcccatgttccacagaaggagatgagggctcagatgttccttacagataaggaatggctctctgggttagccactcctggatttctttgttgttgtttttttgttttgggttttgttgttgctgttgtttgaaacagagtctcattctgtcgcccaggctggagtgcactggcgtgatcttggctcactgcaacctccacctcccgggttcaagcaattctcctgcctcagcctccaaagtagctgggactacaggcctgcgccaccacgcccagctggtttttgtatttttagtagagacggggttttgccacattggccaggctggtcttggacttccgacctcaaatgatccacctgcctcggcctcccaaagtgctgggattacaggcaccggccaccccgcccggcccactcccggatttcttaactcagaactcagaatcaggtgcacctgccacacaggatcattgtcagggcatgttcaagtcaagtgatccctgtcaggtgcatctaccatacatagaggcatacctatttgattccacatcaacattctagccttcaaaaaaaagtctataaaattattgtagttgaaaagaactagaattaaaaagagcttaccaactcaggcatctcatctgtggtatctattaataactagacagcgcttggtttgacttttttttagaaaaaaatataagtaatgtggcatttaaattttttaaaaattcaagaatttcaaaattatcacatatataccgaaaattctttgctttccaaatttaaccttgtcttaggaatgtaaactaactggtcagagaattcattcccctttacaaatgaggaatcttgagcctgatgaggtttgcacaaagctaatgacagaggtgggctcaactctgaaaaccgactctcattccaatgttcaggaccccaagaaatgttacagtagtcttactaattttgaatgacagcttcctcattaaccaacccaagataagttataggtgcttttttgttgcctctttttgactgcactattagtcatatcttgattttatcaataacaggacttcttgttacaagtatttaataattccaacattcgttaaaagatggaattgtaagagtaatagttgttaaagctttccagattaggggttttcaaactcaaaccatgcttcaaaatcacctgggatcctgatcagtctgcagattcatcttctccctagctccacagcctagatctgatttacgtgttctgggacgcgcctgaaaacagaccttcccagggtggctctgcttcaggtggctcatggatcacactttgagaaatgatatttggagcagggcttctcaagctttacagtgcctatgaatcacctgggggccttgttaaaatgcaggttttgattggacaagtctagggtgggactgagtctgcttttctaacaagctcccaagtgatgtgattcagctgttccttccggcagtaagggtctacttaagataacccattacaactaatctcattaaggtttttaaaaattttaagttacaagttattgctttgtaagacactctttgcttacccacttttaattatacagtttagtgttaagtagattcatatcgttgtacaaccatcactaccttccatctccagaactgttttcatcttgctaaactaaaaccctgcacaccattaaacaactccccattcccccacctccactccccattcccccacctccactccccattcccccacctccagaacctggaaaccaccattctgttttccatctttttgaatttgactcttcaaattcaaaaaggtaccgcatataagtagaatcaagtatctgtcttttggtgactagcttgctgtgtccttttaaaaaataaaaattttcatgcttctcttccataaacctgcatctcatcctatagatttgtcacttttggcaccaacttaaggactgagcgccttttcacacatccctaagagccaagctgctcctggttcgccttttgtttaattatagaagttacaaaataaggtagaaagagttctagatttgaaaacaacacaatgactcaagcagatcaagtgatttccaaatattaaaaggtgatatgataaatgcctcctggccagagaggtgcacatagggtgagagacaagaataaaaattaaaacttaacataatttgataagagatcatctctgctactgctgagtattactaaataccattctatgcaggtccatgtaggatacaaaagaaccgagatatagttctggaccaaaacagcttggagcagctttgtctcacagaaatataatagaggccacatatctaatttaaaatttcctgtagccacattaacataaaaaggtaaaaagaaacaggtaaaattaattttattaatatattttaacccagtacatcctaaatttcatcatttcaacatgcaatcaatgtaaataattatcattaagacattctacatttgtttttttctcccagactaactttttaatatctggtgggttttttatactcacagcatagtttggactagccaggtttcaaatattcaatggccatgggtggctagtggccaccgttgggcaagacagacttagcatcagattttagagatcaataatatatttcaaggagtagtgacttgaatgtggacaggttggggttatgggagaaaatctaaagccaaagacacaaacctaggcagagaaaccataataagcttgaatacactgagactgcagtacaccattttatgcgctatgctatcttaacgcatacattttagtcaatgggaggcatatcactaggattctatgttaccatcattaaccctattgatcagcaaactgctcatctccccccatttctcttgttgcagttctcatatcataaattgtatttataggtgtgtgattaattctaatacagaaattaatttaaggtttcctttagacttgaacctactttagcttagttcagtcctctgtatcccgagagatgagctgaaaaagcagatatagtagagataattctaaattccctactttgtttcttcaaaatataggtattctcactggttgctttctcctaacactttcctttctttctgccttatttaaaaaaaaaaaacaaaaaactcaaagcctgatagattttagagacgcaattaattaaggttatatacggggctttttaaaaaccacataattgccgacaaaataccaaccaggttggtgttccgtgaggcaaaagaaccacaagtcattaccaaaaccttaactcatatgggaaggtaaaaatatacagcatgctgttttcacataccatactcagaaagccatgtgcgagggaggctataatcaagacaggaagaggcattttcacagataacttcttaacggggttgtagactgtcactctcacgcccctcacttgttctttccaacctattaccatctggccttgctccaacaatctgcaactcttctttcaaggtcaagaacaacaaatgccatcagtctcttctcagccctccagttctctgactactctgccacattctctttttttttttttttttaaagagacggggataccctctgtcaaccaggctggagtgcagtgctgtgatcatagctcactgcagcctcctgggctcagacaaccttcctgtctcagccttccaagtagccgggactaccggcacatgccaacatgcctggctaattttttttttaattattttttgtagagacaggggtctcgccacgttgcccaagctgatctcaaactcctggcctcaagcaactctcctagcttcagcctcccaatttgctgggattctaggcatgggccactgaacttggcccacttttcttctttaaattcaatcttctccagtttccaccaatctatctcaagccaatcattctttccctctcattggctcctcttttcataattctgattataaagtaaggctctgtcttctactcttcttgctttctcactcagacatatcatccatgcctaagggtcaacagcctcctccactctttcaattctgacctttcacttagcattcccagtcgcttgctgcatgcttccaattgcagggtattaattacttttagcaaatgtactagaatcaagtgcccaactgattatcaaattccggaagtgtacccaaaggacaatgactaattcctcattgggtcaaagtctttcctatgtggaagcaagagaaaggaacagaactaacactgaacattgtgaggagcccaaaacatgactcctgctgaacacattctatttggttgtagaacccaaccaatataggccccgttgatcgatttccccacaacaagaggaggtcataaaaatcatgcttccactttctcaatagatacttatcgctcatgaatgtctgtgaatcagaagaccatgggactataactctactccactcaaactctccatactcccaaagctggacctcatggtcctcagatcatgtaatactcagacacagcactccagtaaaccactttctggccagaaactcatccttcccatagttcctctcccttccatccactacagcttgttcatcatgatcctgaggtcctggatgctgcagcactctctgcagttatcaggggaggcttcactgccttcagttcatttccctgccagcctggtctaggaccctcagcacacacactcatcactgcacatatcaccaacgaccacccacatgcttttgatgcccaggctcatttggtccagcctatttctctcctaagtgtgagactcaataaatacacaaccaccccactgtgctcttcaagagcttattaactgcctcttttagattctcctgggtatagtccagacttaaaatgcctcactttgggagacaatgtaatttaaccattggaggaacaaatgttggtctatatatttcaggcattttccaaataaaaacctccaagaaaaagcaaacttgtatcttaaaagatgcagaactatttagggcaaaaagtacacagagaatgagaaagaaaaaagatgtcactgcatttaacaaaagagttaacaatattgttaacaataacaagagttagccatgaagtaattaggatatagtacttgaaactggcaccaccttttaccaggcattacaatattgctatgagttcacaaagctctgttagagcagaggaaaaagaaggatttgaattctgtcactgtactagcaacaccacctagggatgaggaagacaatatctaatagaataacaaataaagtaagtatacatgattcatcaagctcttcaataaaaatgtattttagaatttatcaacatcccttttgaatcatgtttcaaaaatcacacaatctgttcaaacacggatagacccccagataaatcagaatctctctctctgttaccacgcctctgtggacttagaaatcaccacttagatttgtaaacaaggcttagtttcattattgtaaatcaatttggcaggacttatcactccacagagagctgaaataattgaatttctggacttctaaggaagaaggtttaagtacattaaggcttccaaaaggaagatcaccaactcttctttagcagaaaatgcccctggagaattttgaaccatttcttgatctagtggcaactggatgttatcagtggcaactaaggtatctgtctacacctgctgaggctcacaagtaaaaactaaaaagtactgtgaatctctgtgataatggagcgtaaagctaccacttaagtctttattactagtaagtaacggattttaagaaaaaaagagatactcaaatctatctatagataaccaaaaaaccaaacaaaacacccagaaaaatctaaggttgaagaacatatataatttgagacttttgaaacaaaacacccagaaaaatctaaggttgaagaacatgtataatttgagacttctgatcagagccttcctcaataatgtaagtttaaaaactattaccaaagtgacaagatcccatgtcagatagcagaatgagaacaaggctactcttcaacttagtcatcctcttttatcactacaacttcaatcatagatgtaaatggaaatttctgcttcctttgctacttttctgcttgactgaattttataatgaaaaacgtctgttccttccaggcagagcacgagtgtcattcaaattgtacacaccaggcaaagagtgaatgcatttgtttagatgcaaaaatcatttaaatatgtgtcattataggctgcagcacatttgcggattcggcagtttaaaattctcttaagcaataaagcaaggcatcaaatgaaagtgcactcaggcttcaaacatcttcagactatgttttcctgtttgcacacagcgagccccgccttcctttcctgaccccactcaaacagaaagcagtggaaccatgccctagcccatcctattaccccaaacgtcttccaggtcagcaatccaaagtcacgtgaaagctccatcttcagtttccctctccagggagcaaatattttgaagagcaagcattccaagcaagcagaaactcagcctttaaatcaaactaagcttaaaagtaaggtcctgccgcacacagaaggcaacagaaaagtgtctgaagagatagctcccattttatatttaacatttagaaatgagaaaactgtgtgtgattaatgcttataattagagggggttaacccttatttcaaataatgtagttcctgtctttcatttaaaattataaagatgactaaaatgtacatgaaaggaaaattacagttaggatctgctgtgttttaacccagaactgtggttttttgaagaaaatgctggaaaagattctgatttggtaagaatatctggatatgagaatcttctaagaaaggtgatttaccattttcaggccaaaggcagagagtttctaacaatgataaaattaacaggctgtaggatcttcattctctaagcttcaggtgacccttttaatgactaaataaagtgtgtactcaaggtcacccacgaggaagaaaaaggtcagttccctctcttgagggaccccctccccactcacgctattacacagcaattctagagattcacttcatttttggtttatgttcaaactgtctggatatttcagggccttcgcttttaagtttccataatagggcagttgactatttatataagtccctggaaaatgtgtatttttaacgtcatctagagtaggccacctttgggggaaaacagctaatgggttaaaaagccaactggtgtaccaagtatgtacaaaagacatcttttataacagttctcacgtgcaaaagaacattcattaagtataacaataaataacaggcaatatgtgcatttttccagaccctaagcacttgataaagccatattgtcattttacactcatttttagtagctgtttaattggtattcctgtataggacagttttgtaggtttccggattatttcacattctcttcttcctagttataaattttggtacaactgtaagctctcctcacactgtaataattacattgctgagaccacatctgtttttttaaaaaagatattttgcaaaaaatatatttaagttgaagtatctgaaatacttttcaacgtcaaactttgagaggattatgcttaattatatatcttcacatctttaaattgttaaaaatgaatgcataaatatttcctagggatttatgcttgattcatttgattcttacatactagttgttatttaccggcagagaaagcaaaagcaaaaaaaaagaaagcaaaaacaacaaaaatagttgattctggtgctagtccagaatcaggttgatttctgcatcaatagcagggtttctacattaaattcattcaaatttaattagttctctgcataaaatcaagggtctaggagaatttaataaaagctgaaaacaatcctatcctttgcctgaaacagatttttatcccaaatggtactcagcaataagccaacagagaaaaatggaataacagacatatgccatgttcacgagttctctgtttaacctaagaagtctgaatttgccattttttgataaggaactggtgtacatcttagaagaaatattccattgagtctgaattcttggtggagcacccgcagaaagagaaccagtaaatagtatgtatgaggcctggcctggacataatgactcaggaatcatcaatgcaggcctctgaaaaaccactgcacttatgagatctcctagcaagtatgtgttgtgtgagaaaatggacaaccccagggtactcctattaaacactgatatttagaatttctgaattctgattctaaatattttgcaatatttggaatttctgaatcctaaatattgcaaaaggtggcgcggggaggacggggaagggagcctgaaaggaaaatggaggacagcagaaagaaaatcagaagcagcagaatgacatcagtgtggggagaatgcacccatcaaccgatgccactgagagactgtggaggacacaacagtgcccagtgagtccgacaaccagaatgatagcaaagagctcattccctggagctcaaggaacagatgcctgataacaggtgactgtggagggaactggaggttacgaagatcacacaggaacttctgactaccatataaagaagcatatctgtgaagagacagagcgagggtggaagttaaaggaatacacagagttgaatgactggagtgagggatcagggagctctaaagaagaggaaaaatatgagaaggctaaatactattgagatgtgaaattaaatacagggtcagtaggccaagggtctttatgaagtcaaagatcagatacaatgagagtaaaggacctactgaagaagctgtgtgcacagatgcccaggaattcagactcacctaagaatttagaacaaaggtggaaaaagaaaactaagctcaaattatttaaatagtacaacagggtaacttcttgacatactgaacatgagcctattcatgttaaatatgcttggagaatatcattagtccatggcttacaatcaattctaagctttcaagaaagcaagagctacaggacctattcataaaaatatagcaacattgggaaactaattatcttcccagctgataaagataccatccaataaatagggggatcttcagtgacatccaaaccttcaaaaaatatattttaaaatgttataccacgttctcggaaggtagttaacactaaaaaagatttgggggaactgaagctgagtaatattcttgaaaatacaggtacctaatcaataaataaagagaatgccccccaaatttttcatggcatgaaaatacttaaaggtttaagaggggagtacctacatctattaatacaccaaacacctactgaaacgccacattcatgtaatcacttaataaagacattaaaataggatgacaggagttcatgtttagcatttataaatagtatcctaacctttaaggtacaacataagaatctgaaatttctaaaatctattatcactgaataatatttagaagcagatttctgtgaaaattaattcttaaggccaggcgtggtggctcacgcctgtaattccagcactaggccgaggcgggcagatctgttgaggtcaggagatcgagaccatcgtgggcaacatggtgaaaccccctctctactaaaaatacaaaaattagccaggcatgatggcgtgtgcctgtagtcctagctacttgggtggctgaggcaagagaatcgcttgaacccgggaggcggaggttgcagtgagcagagattgcgtcactgcactccagcctgggtgacagagagactgtgtctcacaaaaaaaaaaaaatctttatcattagccttaaaaactaaggacaatgaaactattataaatgaatctaatggtatgttttatctctaaacacagatgcctctgatacactgactttttactagacatgtgtaggataggtttaaccctatttctggagttgaatgttctttttattaagatccaaagacacttggtttcttctcttctgagatccctatgttacttcttggttgttacataaaacctgctcttcctttgttgatcaataaggagtaagtaaagtaaatgattttgccataatctcagaaattcttttaggcatgtgaaattgctgctccacatcttctgtctttctaatgtttgggctattctttcttttccctttccttttccaatatttggctacatcctcaattcattcattaaatctatatatttattaaatatgtactatgtaccagacatgttcaagctctgggaatatttcagtgaattgacaaaagtctcaattatcgaagagcttacattttgaacaaaaagcaattatttcccaatgtttgagcaccgcaggaaagggttaaccatcagcatcatgcactacttattcacaatatagctgcacaattattgtttcctcttatcaggccctcaaagccactgattataatactttgtcccaacctattaccctacaagtttgctagtaaaattcgaagatgaccaggagctatttgcaggatactacaggctatgaaagtattactccagagtataatcagttttttccccaatccaattgtatcatctattaaaagagctaacataataaaaagctatatcctgatgcccagaatttacagcgtaacaaggactaagaaagcaggtatcttagaggtaactttagcctattaatgacatgtgcagtacaaataaaaccacattgaatgtacagatatttttctggacatcgaataagagaaataatcaaatgaattaatgtctgtccaaatcaaaaatctctacaagtgttccaactttaatgaaccaacttagttctattctaattttctattattatttctcaaggctaccaacacaaactactttccctggaacatccccatgaatatatttatttatttattgtttaattttttttgagacggagtttcgctcttgtcatccaggctggcgtgcagtggcgcgatctcggctcactgcaatctccgcttcccggtttcaagtgattctcctgcctcagcctcctgagtagctgggattacaggcgcccatcaccatgcctggctaatttttgtacttttagtagagacggggtttcactatgttggccaggctggtctccaactcctaacctcaggtgatctgcccacctcggcctcccaaagtgctgggattacaggtgtgagctaccacgcccaggccccataaacatttttaaatctacacctcttcattttctttacgtatccctcaggatccacatcatgggtctactttctttcaaacaacttttaccatatgctccagctcacactaccatctccctacctcctatgctcacaacaacccctcatatgacttacattaaaaagtttacaattattaattaggattggaagtttccaacagatttgtagtcaggagagactattcagggaacatgagtctagttttgatcacattgagtttgaagttcctgaacaaacacgtgtcactaaaggagtgaagataaacatgcttctagagtaaaaacaatcacaagtacaaacctctacaacatcttacacagggaaattcagccctaaagtctatcaaatgggcataaaggtaattttatatttgtataatcttaggttatagccaagaaaaagcaaacatcttgtgaagttgagatatagcatacaacaaactcagctcaattaaaccacagtttagctttatctaattcaaagttaggacgcctttaacagtaacttgacttgcaacttctaagcttaaaagaaattttaggctgggcgcagtggctcacgcctgtaatcccggcactttgggaggccgaggtgggcggatcacgagatcaggagatggagaccatcctggctaacacgatgaaacccagtctccactaaaaatacaaaaaattagccgggcgtggttgtgggcgcctgtagtcccagctactcaagaggctgagacaggagaatggcgtgaacccaggaggcggaggctgcgatgagccaagactgcgccactgcgctccagcctgggcgacagagtgagactctgtctcaaaaaaaaaaaaaaaagaaagaaagaaaaaaagaaattttccagattaaaacaaatgtctggaaaccttaaactcaacttcttcctgccatcaaatataggcctccttgatcgatttctccataacaagaggaggtcataaaaatcattcacggccatctcatttagttgtctcttctgcaacttactccctaaactctgtgcttaaataactattctcctgatttttccgctgtaggtcttcccactatggaacatgagcccacccctttcccttcccaccatcctactggtatggttttaccccatatatggcatctgtattgtgagtctgccagaacgctcatacttaggcgtatttttatcttcgtatcttacaacgctgttattttgtacttttggcttttctttgtctacagttaatatttgccccatttaaaaaatttgcctcattttctatgcatccatcaatactgtatctttcccaaacgctccagtagaaccctaagaagcatgctaagtacaggaaaatctttaacgcaggtaatgcatcaatgccattttttcctggaggcctctctcctgcgaccagcctcgttcgtctcctccaatctggactagctgctctccagacggttgcacagctgttgcctgagatttcccttcactatagggtttcaaagccaaagcctaagactcactgacaggagaaggaaaaaaaaaaaaaaaaaaagacagacactcctgggatgcatcaccaacaagttgaaatttatcaggggatatggaagagggaatgtttaatgaaaccactcagtgactaatatgataaaagagaaagacgacagaatttatcctttcactgaacactgaaacaaatattgagaaccttctttgtcaagtactaaaatctgaatatttcctaacagcctttgacactgaaattaaaatacgtcttaatccagactgtagattcatctttatgtcgtttcttatatccatgatgcttatttgtgtacctgaaaaaaagcatattcttttcctcagtgctaattgagaactggctttaaaaattcattctttatttaatcacaaacatcaaataactttttaaaaatataatacgtgagaaaaaaattgtccttaatttcatttcagtattcccttcataataagtaaataaacagttctgcttttatgggtattatctggaattataaagatatgctgtacctaattcacaatagtaaactgaaaaattttaagtccacaaagaagcacttgtttagttcttttcctagggaagaaatacatcaaaagttcccataatttattatgagaagtctatgtctaatatattttacatatttatatactatttttaatgtagttcattatttaaaacataatgaaagcttgggtttcatggcaaaggctgaagttaattcagttaatgccattattttatgttgtatgtaagctactcttctaccccaagaatcgtaataatagctgtctgtaccactctaaacacttccttaaatttcatattcttcatctggctacaattatccacatggcataaaccatagagctctcaatcccaaaatcttaagttttgtcacacacaaattctgttttctactacagctgtctggaaagttatttactggcttgaatggttaaaaaaaacatcaaactcggcagggtgtggtggctcacgcctgtaatcccagcactttgggaggccgaggcgcggatcacctgaggtcgggagctcgagaccagcctgaccaacacggagaaaccccgtctctactaaaaacagaaaaatagctgggcatggtggcacatgcctgtaatcccagctacttggcaggcttaggcaggagaatcacttgaacccaggaggcggaggttggggtgagctgagattgtgccattgcactccagcctgggcaacaaagagtgaaactccatctcaaaaaaaaaaaaaaaaaatcaaactcaagacaatatctcaagatttttatttgctttggaaaatgacacgatgagaagagggttctgaagacaaaggggaaaactgtttcctttctctgcttggggtagggactgatggaaacacagtgcttgagaaagatgctcagaagcggctagagtagaaaaagaactttgaagaaagtccactttcttctttgattcctcatcataaccatttgtaatcatttacctcagaataaaagagaaaattccacgacaataaacacagcttgaggttagctagaaatactgttcacattaaatttatggtaaaacagcaagctgaaatggtgtgggaattatctaataatttccaagactgaattacgcagctataaagcaacagcagctgtttactggttggcccagaaaagttcacatttcagaccaccagatcagacataacagtattaattcctcatacagggagaaatttttgaagactcaacataacagaaatccagtgttcagctgatacgttattaaatctgacggcatttttatggcatttttaaactatgacacagcttcaggaagtcctgaaaacttgagcctctaaaggcatttttgtcttttttatacaacataggtgcaaaaagctgaaaaatgtgaccatgaccgtgtgaaatttaaattataccttactttttatttttacttctgtggatgccagtgtctgtcttagtctgtttctccctatatacactgtatatggaaaccaactaaaagcctatctaggccgggaatggtggctcacgcctgtaatcccagcattttgggagaccaaggtgggtggatcacctgaggtcagaagttcgaaaccagcctggccaacatggtgaaaccctgtctctattaaaaatacaaaaatctgctaggtgtggtggtgcacgcctgtaatcccagctactcgggaggctgaggcaggagaatcacttgaacccgggaggcagaggttgcagtgagccgagatctcaccattgcacttcagcctaggtgacaggagtgaaattccgtctcaataaacaaacaaacaaacaaagcagcatccataagaaattaacacaaaatatgtttagctgttcatttgaaagcaaatgactggggttataattcacttgtaacacttaataatctcaaagttttgatttgtgaattccattatctcttggagaaagctacaacacacatataattagtggtctaactcaaatagtgctggaatttcctatagaaatggctaagcatgaataaccaaagtcgcaggtgattcctaagattctgctcattttttaagtttttttttaagttttttgtttctttctgctcattttttttacatgactgaattaaaatagcttttaaaaaatttcctgctttccgccgggttgtggtggctcatgcctgtaatctcagtactttgggaggctgaggcgggtggatcacgaggtcaggagttcaagaccagactggccaaggtggtcaaattccgtctctactaaaaatacaaaaaaaaattagccagtagtggtggcaggcacctgtaatcccagctactcggtaggctgaggcagagaatggcttgaactcaggaggcagaggttgcagtgagccaagatcgcaccactgcactccagcctgggcgacgaagctagactctatctcaaaaaaaaaaaaaaagaaaaaaaaatcctgctttccaaagattactggtatcttttactggaaaatggttcctaaagaccataatctaggtgcagtactggtgtttaccgctactgagttggtcttttaggccttttcattatttttaggcctgcagcggacagtatttatggggaaaaaatgttatctgaaatctacaacaatatgttatactgagaaatgatacctaaaagtcaaactcatgactacagggtatctttttaatagattatatgttacatgtgaatcttcttttaccacatcaaaattctgattctcaaatacatgggatgattgaattaaaatatcacacaactattcacttatgttacaccatattacttatgcaccaggctcagaattacacactaatactaccaccattaatagaaaaacagttgtttctttacccacatcttcttctcattcttccccattaaagttactgtcacaacaaggctgtttatttcacctgggtgcaggcaggctgagtccgaaaaagagtcaggaaagggagatggggtagggccattttgtaagattcgggtaggtaaaggaaaattgcagtcaaagggggttgttctctggggggcaggggtgggggtcacagggtgctcagtgggggagtttttgagccaggatgagccagaagaaggaatttcacaagataatgtcatcacttaaggcaaggaccggccattttcacttcttttgtggtggaatgtcatcagttaaggcaggaacaggccattttcacttcttttgtgattcttcacttgcttcgggccatctgggcgaatacgtgcaggtcacaggggatggtttagcttgggctcagaggcctgacagttacagaatctctttattgtcacagcatgtagctgtggaatactatattatcatactttttaccatcgttgagtcttagtttttatgtttctccttaatgctcattacccatccttatatcagtttttctctaggtattttgggtatctgaaacttgttctctagcagattctacaggaaaataatgtgaaaatatgccctgagttattgtacgttgatatttatttcatgtgatcatatctgaatgtcagtttgattgaatataaaatccttgttttggctgggcatgatggctcatgtctgtaatcccaggactttgggaggccaagatgggtggatcacctgaggtcaggagtttgagaccaacctggccaacatgatgaaaccccatctctactaaaaagacaaaaaattagctgggcgtggtggcgggtgccagtaatcccagctactcaggaggccgaggcaggagaatcgcttgatcccaggaagtggaggttgcagtgagccgagatcacgccattgcactccagccggggcaacaagagtgaaactccatctcaaaaatgaataaaataaataaataaataaataatccttgttttgcattggctttctttgatatgttaaatgttgctttattttcctttggcataaagcactgctgtcaaaaaactcttattaaaatatagtttctttgtaagtgaaaaacaaaaatatttcctgccctcaaaaattataaacttagttaccaaaaagcaaaaagtactatgtgtatacataaaagcaatatacattcattaccatcttgaaaacaattatttggatataaactttaaaattataaaataatagtattcattataaatgaatgaaaacagtaatgatttttaaaaactactactcttatcatgaccaattacctcttctttttgaaaagtgaactagttcctaccttaaagactttgttgaccctctgtctgaatacctaaaatacatctcctttcttgccttgaaatcttatccttgaaatcttggctcacaatgctacttcctgtcaagtcttccttaaattcctgagctgaaatcccatccccttcaggcccactatcaactctgtaagagggaggcccacatttcacccacctccaggggctcacacactgtgggtgatcaataaaacgtacacaatgaatacgtaactgaccttttattggtcaattttgtaggacttatttctctgagaatattcaattaactacttcctaaggtggaaatttggaaaagcaatatttaaaattgtttaaatagatttaaatagtaattattttaaatggccttaagtagaaattacaggcgcttttactctatcaataaaaaaatcatagctaaatgtaggggtatccatgcttatgttaaactcaggatcataaatcagtattaaaattttcctccatattttcataaacaattatgtggcgcatatattttattacaccaactataagatttgcaaggcattccgccaataactgttatataaaaatcaactaaacacaaatttatctaccaggatgtttatcacagcatcatttataacaactattacaccaccacaaaataaagaaaaccacctaaatgaccataaaaaagagtaaacacattacagtgtctggtgtgatgctacattaaaaattatgctctccaagaatatttaatttcacaggtagagtattctaaaaatgttaggtgtaaaaagcaagtcacaaaacaggaaacgattaaataacactaaaaacaaaagcaaaacatacatgaaaaaaatgtagactgcaaggaagccaaatggttttgattatttttagctagtggttgtattttctcaactttgtacgttgaatatatgttacttttgtaatcagagaaatttcttttgagcacacatttgcaattcttagcatgtactacaaatcagatgtccattagccttgctattcatttttcaaagcaattactaacaagccttgggacaatatcatgccaaataagctgggtttctttttctcacctatcatctaggacctacagagatagataaattctgtgcttcaagaaaatatcagcaaagcccactcataagccataacagcagtttttcaaaagttatcgtttctttttaatgcctcgttacttaatgacacctgaatacaactccagtaaagaagacaaaactgaagatgtaatgaagtataaatcacccatgctattagagctcttatcaatcaaaacattagttgttaaaagtcccagaaagaggacacaataccaggtacaataattaaaatgaaaagaaacaaaactggaaacggagccaagaaacaccactacgcttccttcttttcaaaatgcgattgttaaaaaagtcagtctcctcaactcatcctctgtcctgagttttagaaagcaaatcaagcaggagccaatgcaattgaggcaattatggaacttgggacagggccaaggaagtgctgcagtgagccatggaggatgacctacctagaagggctccatttttttttttttttttttttttttttttgagactgagtctcgctctgtcccccaggctggagcgcagtggcgcgatctcggctcacggcaagctccgcctcccgggttcacgccattctcctgcctcagcctcccgagtagctgggattacaggcgcccgcaccacgcctggctaatttttttgtatttttagtagagacggggtttcaccgttgttagccaagacagtctcaatctcctgaccttgcgatccgcccatctcggcctcccgaagttctgggattacaggcgtgagcaccgcgcccggccgaagacaccatttttataggtgttcttgcttaatcaaatggaagagggcttcactttctaagtcttcctcacccagaaggaatctgtgagataaatgtaagctcttcccattcttccttctggcctgaaacaaatgtggctgccatatgcaattttggagggaaaaaaaattaaggaagatcaagaatcttcctgaagaatcagtgatgattaatgctgcttaaattttgttgaagatcgtatgaatgaacgttattttcttttattttggcatcatggtgttttcaaaactaaagtgtattttcccatactgtatgtataaagctcataaagtacaactaccaagagataaaacaaattaatgatcattctgtgtcgactttcaagtcttttgacttttttctattatccttcaatggtactacatacaaatacaaaattatatgtactgatttcatagtctatcttttgctgattataaaagctactcatttattatacaaagtcatagaaaattgcttaaataaaatcaaaatcacctgtaatcccactgttgggagataaacactgataagatttcttttccggacatgttttcttttacttagtatgctggttctgaagcatgattaacgttgaccattcaaaggtcccatgggaaggccacatataaaggagtctgatgtctctccaaggatggctgattagcctttcctgatgaagaaatgcccagcaattctggtcattccttatgagaccatgatgtaaacaatcaagaacattcaagaatttgcatccttcttgtatgcagcagctgggctcattaaataatgagaatgatgaagtcatcattctcatcacagtgcatgtataggtcccacacatgcatctcccatgacttcaaaattagtaggatttccacagtgcaggtcggtggggagaggaggcgccatgggcaccaattctctagcacactggattacatacggggatttacaagatccttaaagtctacaataaaaatgtttttccatcctcatcgccatctttaaagtttggtgaactctcatgtgacatttctgactattgtgttgtactgatgtgtctcaagagagttgttgtttacataaattcaaagaattaccctggtataaaatgtcacagtattcaaatacatcctttccatgctaaagaagatagctgtagataattgatacaaaggcagccaagaaacccagaaaacaaggcatgcttttcctaaaattgtattaaaacaataaaattcaaaattaatatgaattgaatacctttctcatttgaccatatctgataagatttctggtcattactacttacacatttggaaggtcttaattacaaaatgaaacagaatgacatttaaggtaaaattctttcacttgtaattccttttttggattaagctattaacctgactttgccccaataattcaacagtaatttattttacgcaatgttccttgcctttgctggtcagagacaagtacagaaaagtgccaatttcaacagtggatctattacaccatgaagagcagtcattcaaatggaaagggttgaaagctttgcaaagaaaatattctccttgagtaacagtaatgatgtgcttgaatcacacatgagataattaataaaatgttcacatgattaagatgaatcttaccctctggttccagaggtactaccaaaagcaaagggtgagatgagaaagccaacttattctcaagggaaattatccactccatgggaagaaagtggcaacagcaacctgacatactttccccatgcagacaagaaatgtatagcacatatgtccgaggcaaaatattacagaaaaataatccagtgccacactggatccttcatctgataaagaggttaggaaggttgtatgccacacataacaagcatttttctctcttcaagctttgttttgaattttaacacgcttaatgtttaagataattttattttgtttgctaggtcagtaaaaaaaaaaaactcttgtctaaaacatatatttggatacagtcaagagattttagagcatacttatgttaatgctgaacagtaattctttgttaagcaggaataatatgtaagaatgttacctactactactataaagtagaaaacatatcacatggagatttatcctatactaggtcatggttgtctcctctgtcaacacaacgatagctgtgagtttcttttttagtgctattgtctctaattcatagtgaatatttgttttaaaacaaatttttgtgtatactgtaaaaaacactggaccaataatcaagagagcttggactgtagtgctgactctcccatttatttgctgtgagttatagcaagaaattcaacctctctggatcttggtagttgtatagcctgtgaagagagacgaagaactaacactgcctgtctattaagtgcaagtaaaatgtacatcagttacacctatgtccctatgttacctatgttacacctattggaaaacctatgtttttcagttccttttcctgaaagacaaggcatgctctacatactctaccaggttattttatcaactctgtattatactctgggcttgagacctttggaaaatttgccactacctaagaaaaaagcagcacctatattccttaattctaatctaaggttaataacaaagtaagagacaacatatgctctacttgtcatattagggtctaatttcaggtccaatggaaaaggaccagtgattcataaaatgagaaaatatggtaaaatgattcaacacgccaagtacctacaggaaatagcaaatgattatctagtcccatagtagtcaagaacagttagtgtcaacgtgctcatttcacatcagacacaaccagaactgagaaatttgcttaacatgtcacaagtgacccaactttttgaattatgtacctccacatcaaaggagcccagaatctgttcggaggatgaaagagaaatctgataatggttgatggcaaagccttggcaggaataaactccttccctgagaaagaattattttataggcttctctccatttctccttgccagtctccagcctgtgcttcacagctgggtaattatctgtcagtggaatgatatattttcaagtggttctctttccataatggttaaaaacataaggtgaggacaggtcattaactttactatcaaacaggtatttggtagatgagattaattatttaaaaccacattacttaggctgttgtttccctaaatggtgcataatgcagtgtagcacaacaaatacaaatatttggacagtctccgtgtaattataatattattataaaatcttctgacttgatattgagatctgagaacatcttttatatcctttattacttgttgtactgttcgttcacttggaggtttttttgtttgtttttgtttttttaagagacggggtctcattatgttgcccaggctggtctctaactgctgggctcaagcaatcttcccacctcggcctcttacagtgctgggattataggcttgagccaccacacccagtggaaggagagcttttcagagatgaggaggcttgaagagcaggggcaaaggaagtgatcaacagataggataaaatagacctggggttcaaaggatatttgctacaacaactggcactaggtagtaaataacaatcttaatgtggatttcatctttccatcaactttaatacaaatcattctgaatagaatatgaagcagaaaaatctatgtaaaatgataagttcacttctgaaacatgactgcagttttgagtgtcataccaggagcaataatgcccatccaaagccctacctgttctcagtgagcttacattctaatgaaaatatatttggaatacttcatagaacaggtaagtaagaaccaaaagaaacaaatcattaacaaagcctggcccatcaaattaacagactcatgatctacttcctaacttgtactgaattgttcaatctctgtgtgttatttcttggtgtaataactaagtgagtataaaatacacagttcctggggacagatgacttctatatttttttgagtaggagttctgtatctagaatttaagtgctgcttattttcatctaattaaactgcactttttgatgaaccagaaaagagttgaggccttataaagcatataggaacaaggaataaggaggaaaaaggaaactcttgaattatcagatgtttaagaaatctagttttctacactctcttcatcaattacattgtaagtaaattcaccaggtgaaatcttctttctaatgcccagtgttttcattttatgtctcaaattatgcacatgaatgaacagcaatcagtatgctcttaggacattcatttttgaccatatattacatagatctccggaatcttcagtaaatatccttactttgtaagtttgctgttggattttctttgaaatattccttttaacctttataagaagtcatcagaatatacatcaatatttgtccacaatctccacagacaatctctatatccttatttacaacctgcctactgatgaatacacttgtggaaaacatctagatgtaagataccagagcaaagaacttgacttctgcaatgactggtcacataaaaacaacaactaggaacagactaataaccaagttagattaaatatggagtatgacagtttccagaggaaaagagcacgataccacataaaactactcaatttttttaaataaaatgttgaggtaaatttgaggtttgtgacaaaacaaacattaaacattagtaatcagactgtttcctccagtttgatgtaagcagaaaaaaagccttcccaattccaattcctctactatcaccaaataagaggagtagttattgtagaacagccttttttttttttttttttttttttttagaaattaacaaaatgctgcagcttcacattagattctttcttctagaaagtctatgtgaagaaacacacaaggcccctgttcatgagaatcatctatgcgatacggtaaaataagaattcccggatccgctactataggcatttttcattcaggagtcctggaactggcccaggaatttgtaatttcaatatacaccctgggtaaattcattctgaggcagggaactcaaaaatactgctcctatagggtcagtgcacagaatgtaactgcaagagtccaaaacacagtacaacacagagtggcaatgtgctgaagaacaagtctgtgtatgtgacctaacaggagcatcctctttttcttccctcaagaccaggcccccaatcaacaccagccccacggccggccggctcacctaagcagcggtagggaatcacaaagtggggatgggtcttgcactgcttgcggccccgcttgcaccagttctggatggtcactggttggttggcttctaccacattggtgatctgcagttcagggtagacctgggagagcacacaaaaagaatcaattgttacttgaggcaggggctggcatttacaagcatctaacaagcctccactgtaaggtacaggtggagtgtcccttatccaaaatgcttgggaccagaagtgctttcaaggtctctgactttttccgattttagaacatctgcattatatacttactggttgagcatctggaatccggaaagtccaaaatccaaaatactccaatgagcatttcctttgagcatcatgttgacatgcaaatagttttgggtttttgagcatttcggactctggatttttaaatttgggatactcaacctataccactatccactaagagtcaagcctgctctacctctgaccaagctaaagaaattcagtacaaagaaaaagatagcaaatgaacaagcatctagctattccattcaaaatattaagcaatgcaactttttaatttattgtactcatttagacttaaaatattatttttccaggggagctaaaatagaaacaagagggggaaaggaggattcttacaagcatggggtgatttttgatgtgaaataaattggtgtaggataatagtctgtaatgtcctaaacaaacgttacagtagatatggctggggatattatgtttagtaaaattcaacctccccctatctctcactaatcggacaaacattttacaggatatgacacatagaaagctttctatataaaaatcctgctcttattccaagtaatttacatgaaaataacttatcgaaaagttatcaagggtgtcatttagataaaaataaactcatgaattctctttgctcctataactaactacagccccttgctttgattactgttgtgaatacatcatggtgtttaactgagcacttagaatgaaatgtgaaacttgatcaattaaatcacatttgtgaaatatcaaaccacttctatttattaatgagtagagatttgaaagaaaaacataaacataaaaatctatttcgaaaatgtgcattcccttgcataaaccttgcattgcaacagggtggttgttttgccagataaataacaacgaatagagaagtgacggtataagcaagggaatgattagaatgctgggccatgcaatctcaagtggcaaaagtgagaacatgaggggaattagacacaggtaaaaggtggtagggaccagtggaatctgagtccactgatcacactccaggggctaaagaatgtatggcgcacaggactggagaaagtgaggtggtaataagtagtacttggagagtcaaataattgaaattaaaattttggaggagttgcagtgattggtcattgcaaggagtataatatgaccattgtaagcaatgggtgatggagaatgatgaaaacaaggtcactggagggatgagaatcatgaactgacaaattggaatactggaaggatcattgagatcaatattaggatcacttaagaatcagcaaatgaagcagctacacctgatgacagcaaggcaggagctaaaatcttcaaagtctgaatggtgaacatcgatgaggtagaaagaggtctggagatgaccaacaggtggaggagcaaagtgatttgtctgaaagcatgcacttcaagctgaggtaggggggcttttagggaagagaaaggaagagtggtttggaaacaaaaatgaagaggaaaagaggaaatgaagaggaaaagaggacattcccacctctaggggcaacgctgtgaggattttgagaaaagaacttcgacctgagaaggctacaggagaagtagtgccttccttggagggagaacaaggtttctgagcaagataacatccatggggagttagacgatacacggaatttcactcacaattgtccatgacattcagagggcttgacaaatctaaattaataatcccttatctttgaataaaagtaactgaatcaggctgaatttactgcttccattttaataaggcagtaggagaactatgcatggcttgatgtcaattgagcgtgactcaatctctgtctaaaaagttgatattttgttcatcatggagtttttttgcagtaattttgatttttaaaaatattacattaaaaattcttaatctcaattcctgactgccttgtttacctcaccttagtcccagaccccaaaaaaatcagttaaaaaataaggtactgtgaatgaataaataacactgtggggtacacacctagaaaatggaatgtcattcaacactaaaaggaaatgggctatgaacccatgaaaagacatggaggaacttaactaatattgctaagtgaaagaagcccatctgaataggctccatactatatgacattcttcccactatatgacattctggaaaaggcagaactatggagactaaaaagatcagtggttgccacgggtttgggtggttgggggcagggggaggatgaacagatagagcacagaagatttttagggcagtgaaactactctgtatggtactacaatgatggacatatgtcattatacatttgtccaaacccaaaaaatgtataccgccaagagtgaaccctcagggaaactatggactttgggtgctaatgatgtatcaatgttggttcatcgattgtaacaaatgtaccattctgtgggggatgtttataataggagaggctaagcatgtgtgcaggtagcaagtatatgggaaacctctgtaccttcctctcaacttttctgtgaatctaaaactgctctaaaaaaccgtctattttaaaaacaaaaatttaaaaataaggtatcaatcagtgtagcagcaggggataaactcagtggtagaggtatatgctaagagaacacacaaagaaatctctaaatcagaatcctggggtgggtgctgagagagttattcttgaaaccactgccacagtaacctagctccaaagggatcctgctattaatacttctctttattttactttgttcttaagtatcttaatatctcaatgcaggcactttagatcacagaaaatgctctaaaaatgccactaaaaatttaatattcccatggcttttttcctatataatgaaaggtgaagtggctttttgtacaggaatataattctcccaccgtctttacttgtttattagatcacaaagctgcagcactcatgagtcataaactgtatgacacctgagagtccaccctgagggacatgactttatgtgcagtaaagtgtgagttactgcatctttctaaagggttcttttcactgaaagacaaccctgctgagaatttcctcaggagtcatcggttttctataaacccagtggcaggcatattcacatcatggttccctctatacaacttaaaaccaacgaattgtttgtagggtacaaactgattaccaggagaaaaggatctctttttcatgttggttgcataccatcttcagattcctatggtaatagttggtgcaacagggcagtaactgattaggttgactatttccaagtaggtagaattgcaaattgacaaattaaaatccatgaagacggggcttttccctaaagactagtactagaactttatacagtgatcagccaaacacagaatttacttccagttcccaccaggaaatctagaacatgcgtgttattttctgtgcttcagcttctctctctataacaccaacaatgacaattgttaatatgcagatggatgtggagattacaaaatttgaaccaggccggagacagtggcacacacctgtaatcccagcactttgggaggccgaggcgggcggctcacgaggtcaagagatcaagaccatcctggccaacatggtgaaaccctgtctctactaaaaatacaaaaattagctgggcgtcatggcacacgcctgttaagtcccagctactccggaggctgaggcaggagaatcgcaggaacccaggaagcggatgttgcagtgagctgagatcacaccactgcactccagcctggtgacagagcgagactcggtctcaaaaaaaaaaaaaaaaaaatttgaaccacataaagcccatgcatagttttttcctactgtcctattaaaatggaagcagtaaattcaacctgattcagttacttttattcagagataagggattattaatttagattttccaaacataatgcaattttgctgttccaacatcaggaggtttatttaagggggagaacattagcaatcaaggtaacaaaacttcttctgaagcagagcaagacccttttgataaagcaactgccacatgcacagccaactcccagctcagaaagcaaacaacgaaacaaaacaaaaaaagaaacaaacacgttaaaatttaaaattccaacaaaaattcccaatatcatccctaggtttttattaaataaccccagtaaacatccagagaggaaaaaaagcctttttatgtttacatagatataaaaatatttatatttatataaaatataaatatatagctcatttataaagatataaatatagttcatttatatttaaagatataaatataaatatagttcaacattttagacaagaataaaaatttcatcagaaatacaaatgttctcgtggctagattaagttcctgatttttatcataactatagtagtcctcccttatctgtggttttgctttccatagtttcagtccaaaaatattaaatagaaagctctataaataaatgagttttatttttctatttatttaattaatttattttttttttgagatggactctcactctgtcgcccaggttgcagtgcagtggtgcaatctcagctcactgtaacctccatctcccaggttcaagcgattctcctgcctcagcctcctgagtagctgggactacaggcacccactaccacacccggctaatttttgtattttcagtaaagacagggtttcaccatgttggccaggatgctctcaatctcctgaccttgtgatccacccgccttggcctcccaaagtgttgggattacaggcgtgagccaccgtgcccggcctatatttaattttaagaaagagatagggtcatcctatgttgcccaggctggtctcaaactcctggcctcaagagatcctcctgtcctggcctcccaaagtaccaggattacaggcatgagccaccatgcccagccaacaataagttttaaattgcgcaccattctgagcagtgtgatgaaatctcaaacccacacagtccagaaagtgaatcatccctttgtccagcgtctccatgctgtacatgctacctgccattgatcacttcatcacagcgcttgtgttcaagtaactcttatttgacttaataacggccccaaagtgcaagagtagtgatggtggcgtagtgtcataattgctctattctattattagttgttgtgaattacttactgtgcctaatttgtaaattcaactttatcacaggtatgtacctataggaaaaaaacatagtatatattgggtttggtactatctaaggtttcgggcattcactgggggtcttggaagttatcctctgcagatataggaggactactgtaagtatcggttcaatgttttaatattttctttgcagcatctcaaatcttacataggaaataaagataaaagttccttaagctgcttaatttgcatgtgttttccaaaacatacatgtattgctaatatgacaagcattgcaaataatttgctaatacagcaaacattagcaaatcctaactctcatactccccttcttttctaaaatgttttttatgtgaaacccaattccaactatttccttgattttcctttttaaaaaaggactcgagatacttatacttaaagcagaagcaaacccaagcctctgtcagctagtagaaaaataagctgtcctcaagtcctacaaattttcctaaattatagccacacagagcatttgctgtataaatacgtacactgtgttccaaacacactcttacctaagatcccttagactacacttcaaatgcctacgcccattagggtccccccacatggacaaacctcctctgcacacagtgaaataatgctaacccctcttacagaatgttttctggtatttatcagtgtgcctcacatcgctattaagtttgtatctgtactgcctgcctggtgaaaagaagctttcctcaagggcagaaaacataacgtggcatgttatagcctccccgtggagccccacatccatcatctttggctttcagactatcaggaggctgctgacccccaactccttttatgtggtgctcccaccctcagctctctgaaggaggactcattagtgactgtatttcaaactctgcagcaccatcccctatagcttattagagcccaagaaaaccaaactgtacgtagcattctttccctcaagggctttcacgaacacacaaaggctgtcgttagataaggaagaaacttgactggaggtgagcataagtctgagccacaggtggcatgtcaacacccatgggtgcatggtggcttgcgcctatagtcccagctactcgggaggctgaggtgggaggacagcttaagcgaggaggtcgaggctgcagtgaactgggatcacgtcactgcactccagtctgggcaacagagtgagaccccgcctcaaaaaaacaaaaaacaaaaacagaacgtaacaaaaaaacaaagaaaagcccccaaaaaaccatgggtggactcaaactaggcatctggaagaagcagttagtccaggaaaggaaaacagggaatactcagagagacaagggaagatgagaaacagacaagactggatctggcagagaccggatctgacagggcctgcctgtgccctctaactcttttaagtcttgggatgtgcatttggattctaggagatgccttgtccccttcaataagccctatttctaaacataagctcctttagtagctttatgctccttccaattgaacaaaagccaagaaaaaggcccggcttgcatgctagttcactaattcccaccacatgatgccctcaatctctgtgcgcagaccattctgtcctaccactgcatcctccacttgccttgatcactttatctgatccctgaccacttgctacctcctattctgctgatgggctgtctgtcctattagaatatataatccttgaaggcagggacaatatgattcatctggtgttccctcaacagtggcaaaccctgggatagcacagtaagtgtctgataagcatgtaattaatatttctggttaaggtcagaatccattcaatcagggactttcagtatacattaagttccctttgggtattataaacctatctcttaaataagatattctaaatagttgttggattatgggcttttgagggaaagtaagtatctcaatgcctttcaatattgttcttccaagtagatatggacagcttatacaaatcatagcatctgctataagcagtagattactgtaaataagcactcagctgaggaaggcatttaggaagagtgacaagttaagctctcacttgggctaatggggcccattcagttagtacaggagtctgaaaagcagcctacctacctggtcatacagccatgttttatcattgaaagtgaatgtatcagtacatgaaataattttaagagtgcataggccgggcgcggtggctcaggcctgtaatcccagcactttgggaggccaagacgggtggatcacaaggtcagtagatcgagaccatcctggctaacatggtgaaaccccgtctctactaaaaaatacaaaaattagccgggcatggtggcaggcgcctgtagtctcagctacttgggaggctgaggcaggagaatggcgtgaacctgggaggcggagcttgcagtgagccgagatcgcgccactgcactccagcctgcgaggcagagccagactctgtctcagaaaaaaaaaaaaaaaaaaaaaaagagtgcataagaaattccaaatcctaacaaccaggaaagagggggaatagaaacaatcttagatcatattatattaatatttttatatataataattattattaatattaaaagcttatcatcggtagcctaagtagttttgtctactgaagaaataccttaaaacctggtcaccatcagaatgttttgttccacattttaaaaatctgaagtctctcttctcactatctctccaagttggaaatatattgatctcagacaagatgacatttaagttgctaaatacgtaaagcaagaaaagacattgatgatatttaagaaagccaagaagagaaatgtatatattaaaaaaaaactttgtaaagccatatgttgtcagagtcctacagaaactttgtctctattcccaacattaagggcaaatggagaaccgaaaagtcccttttgtaaacaggccacctaagacaggtgattaatgccaaaagtcctaaaatgaccaaaggtatttcaaaaacacaaaatcaaacatggctaacaaaaggctgaaaacaaagttaatgaacagagtaaatggaattggaaattgctactaattctgaaaacagtttgcctacttttctacttagtcattcaatttttaaaattcacctttagccaaattcttatttctttttgaaaacgctaaaaattatgtggtactaataaaatgttttaaatatattaacaaaacgtcaatgagtaacatgtgatgctttagcacatcttaatttacaggtcactgaaagagatgagctgaaacccgcatgtgttttgccaggattgctggagaacctgaatagttaagggaaaaaacctgcattccagactgactcaggaacaagactgactagatttgatcattactgcaattcagtgacagatagatgggagggttcattttactattctttctacttgtacatatgcttgtaattttgcatttaaagcactgaaaatttaaataaatacatttagtccagaggaaacagccaggtttctaaatttataactgcatgtgaaaaaggaaaaaaaaaaaaacccagatccaaattgtgtctgcatgactgcagctagcatatatgaatatatacatgaaacagagaatcaaatgctctataccaaattgtttcagagatagcctatcttgtatattttcatcgtctcaaagcttttccataccagtccctttttcaaagaacatatccaagaagaaagtaagaaaaatgtcataactgagggtttcctaagtaccagacatcactgcaaatgttttatgtgtagcacatcataatcctgagttagtaattactccaatttatttaagatgaaactagaacaactaaaatcgatgccatttctaagcattcaaagagtatattaatcataaattttaaactactcggacttaggcatataaaccaagacaaagcatgtcctagacaatatatacttctgtttctggatttcaatgacattctttaaattttcctggaatacaaagaaatatcacatcttaaactattctcaacaaaaattcttttaataatgaggaatactgaaaatacaatctctaacttaattgagaaagagaactggaaaacgaaaacgttctctgcttgcaacttaatgaggcgctgagaggcagcgtgcagctgatgaaacgctactgcaataatgggaggtatcagcatgctatgtttccaaatgatggccttatgtaaaagcaaaggcggtaaaatgctgcagggcgttagaatatttcccaataatctggccaaactctgcttctgacattctatataaatatattgttatatccacactttcatactcagagttggaaaatcctgtcaaagaaccttgtttgatagataagctattctaatttcaaagtgttgaatgaaaaacaaattgtgggtgggagggaagagatgggagagaaataaaaataaataggacaggacacaattgtgaaaacacaagcagatgtgtacacatagcctagattttcctattctctctttcaatgtagggctaattttcttattttaaaatatccaaactgccttcaactttttaaccctagaagaaatctacggtcagtaaagcaatccttacatttatacagaccagaaatgcataaaatatatccacatatagacagcctgatccctccattcaaaaactgtctcactcaatatgaatttgagatctttcaaattccaaaaccacaatgtatacgtgcctatgatttgccaattttcagcctacaagggtgaagggtgcccatagcaaagtaataatggtcaagaatgtaccagaccttctaccataggataatgtatatagtataccttccaactcggtaagattaaaaagactacctctgttgtttgctttttatttaattttaatttcatacaactgtagaatggaaaaagaaaggttgagaaacaattcgtgtctgggaatcccatgttcagttatgtattttagaggagaaagttgggcaaaggaaatggttttgctcaactcatctaacaggcagtttctgctttgtgcaggcactgctgtgctttgtttgctgatcctgttaatctatagattaagcaactgttcatttaaagccagaaggttaaaaaggcagagaacagataatgttaaatggtgggaaagaaaacaggaaaaagagaaaatacccataaaccaataaaagagatgataaagccacgttcacctaactttcccaattggaaatctctgcctgcatttgaggcttaacctgttcaaagttccctccagagacctgccctgcagtgtaagttaccagagacatcaacaccttcaagaagcccctagaccctagcccctagctccaagaagtgcactgcatgttattaaaagaatagagaggctggaagagcctgtttcaagttatctctttttttttcctttttttttttttttttttttttgggatggagtctcactctgtcgccaggctggagtgcagtggcgtgatctcggcccactgcaacctcggcctccgagttcaagcaattctcctgcctcagtctcccgagtagctgggactacaggcgtgcgccaccatgcccatctaatttttgtatttttagtagagacggggtttcaccatgttggctaggatggtcttgatctcttgatctcgtcaccagcccgactcggcctcccaatgtgctgggattacaggtgtgagccatggcacccggcccaagttctctctttaaaagaggaagaatagtatggggactcatccaatttcttgtttaactgacaatatgtaactcttacaacacttgcctgtgtgtttctatcataaagtgaggatatggtttaagactgtgaggatacagtctaagactgaacaggcagccttcctggactgctcgggtgacaaagagcaatgatgcccttaatacagcacctcaggatatcatgaatgaggggatggacaggatgatctcccacaatgcttttcacactattattttgtaatttgaattccttctctccccaatctaatctactcttggaaacaagctaatttttctaaaagtgtcttgaccagaaagcattcatgctaaaaatctgccatagcttccacctatctccagaataagaccctccaatttgcaacctcattctacctttgcaattttctaaattttcttcacaatttaattgtattaatagatttataaggtccttatgggccaagaatggtatcccgccactcagcaacacctgacacaaaaacctaacagtgcccaataaatatagactaaatttgcctgtattaaatttgggaagaaatagattcttgagatgtagaattgaagtacacttcctttattcttctggaatcccaaagcctttggtttaagtaaaactatgtggttttttttttttttttttttttggagccggagtctcgctcttgtcgcccaggctggagtgcagcggcgcgatctcggctcaccgcaagctccacctcccgggttcacgccattctcctgcctcagcctcccaagtagctgggactacaggtgcccaccaccacgcccggcaaatatttttgtatttttagtagagacagggtttcaccgtgttagccgggatggtctcgatctcctgacctcgtgatctgcccgcctcggcctcccaaagtgctgggattacaggcgtgagccactgcgcccggccaaaactatggtttttaaaaaatttcatttcatcccaaagaaacaggacaataaaatctaacaattctaacttttagcccctggttttagaatatgtttcaaggggaatattatttttgttttgttctatttatatttataaattcctcaggccaaaattttggtactataatagtttattaaagcaagtggccactttatgctgttaaatgatgaataactgccaggcacagtggttcgcacctgtaatcccagcactttgggaggccaagacaggtggatcacttgaggtcaggagttcgagaccagcctggccaacatggtgaaaccccatctctagtaaaaatacaaaaattatctgagaatggtgtgggcacctgtaatctcagctacttgggaggctgaggcacgagaatcacttgagcccaggatgcaaagaatgcagtgagccaagactgcaccactgcactccagcctggttgatggagtgggactctgtctcaaaaaaaaaaaaaaaaaaaaaaaaaagatgaataattgacgtagttgtattcgagttgtttccataatgctatgagagatactttttgcttctagtataaataacagaggaaaagcactgttttctatcaaagaatgtcaaaagaaaataacaactcaacagtctactgtggtcatctatgattcacacaaactaccctaaacactaaacaaaaagaacaatataaggattttgcatgcttaatgtgtttggaagcatactttgtaatattacaaccaaatattttaagtcatactatggatttatgactttactattgaattatcatggcctttgcatttgaagcggataaaaacaaactgaaggcaaatctggactacacgccaacattccaccaactcttgcctaaacatgtctttagaattctgtcgatggaaggctgggtgcagtggctcatgcctgtaatcccagcactttgggaggccgaggcaggtaaatcactagagttcaagaccagcctagccaacatggtgaaaccccatctctaccaaaatacaaaaattagccacatgtggtggcgtgcaccttgtaatcccagctactcaggaggctgaggcatgagaatcacttgaacccaggaggcagaggttgcagtgggttgacatcatgccactgcactccagcctgggcgatggagtgagatcccgtcaaaaaaaagaaaaagaaaaaaaagaattctatcaatggatagaaatggtctctgcaaaaggaaagtataggctccattttatgggaagctctctcagcataagctggatacagaactcctgcccattaccgctccaatctctgtgccagaaactaccatccacaagcatttacctaacgacgactagcgtgctctaggtcagagctaagtgttggataaaatccactgtaaggcatgatccctagaaatgttaattctcacaacactttgggtctgtagggcttttgcctacagaagccacagtaggtctttgtcttagctcaaaatgctgccttactgtgaatggcttaaacaacaaaaatgtcttttgtcacagctctggaagctggaagtccaaaaccaaggtgccagcatgaccgagttctggtgaggccgctcttccttgcttgcagacagccacctccttgctgtgtccttatgtgacttcttcgtttgagcagggagaaaaaggcaagctctttggtatcttttcttataagggcactagttccatcacgggggcacatactcatgacctcatctaacagttatcacctcccaaaggtatcatctccgaataccatctccgaatagcctggggttagggtttcaatatctaaattttgggggaacacaaacattcatcccataacagtcctcaatacatacttgaaaaaaaaggggggaaaaatctcaaatggtgctaacacaaaatattttttaaatgcattgaaaggcaggtatttgaccaatgactaggcagaagcaaaactattacgattgggaaagaggaaagaatacataagcacaaagaatttggaagacttgggattaaacaaagactcaatttaaaccataagatccaagttatcttctcaatcaaactttacaagggtttataaccaagagcaaaaataaaagactgtgtttttactttttctcttgaaccttgcccttgaccaaaacctggttcaaagaatcaagggcaaaaaaaacactatgaatgataacaacaaaacaacccagtaacacaaaatacaaattcagagaagcatgagactatgaaaggagcagagtagataattcacagtcaaagttatgtatttatcatcatgttaagctatgcaccaacatgtatactgcaaagcaatcctttggaaaaacaaattaaacaatgagttaaacttgtgagcaaaaagtcaaaacgacgtgacggtgatgagttctgttggttttgttctatcctaggaccagactgttaacagccacctcagacttagccagctagttatctctaaaatattttggtcatgagagacacaaagtgagaacgcaaagtaaaaaattcatccaccactattgggagaaaaaaaaaatcattaaatgagtagctctgtcaatggtaactaatggtttccacgcatttttttcaaaaaaaaaaaaaaaaaaaaagaagaagaatttgcccaatgacagataccagaataccgtgaattttcatggtgctgaatcaaacacccatcaaccaggaattctatacctaatgaagcaattgttcaataataagaaaaacattgttcaacaataagaatgattaagatgaaagtcatccaacaaaacggaatcaaaatattaatgtaatacagggtttgagatgatctgatgaaaagactagctgtaaacaatgagtccagttaaagacagaccctatgaatgagaagtatggcaacagaggagatggtaagattataactttgaaaatataaaaataatacaacttataaaacctgtgagaaggaaacgtggtaacattgtgagagtattcttttccttgccgttcctagcaatgaatccatcaatacggtttaaaaaataaaaacatgaagttaaaaaaaaaaggcaaaacgaacactttccaacacacgcatgaaaatccaagcctacaaatgagaactattcattatttctaattataaaagaaaaacaccagaatagctacaatgtggaaagtggcaggaagatcctgaaatatctataaagaatgttctagagaattcaagatgcacaatttgaaagaaaatgtcaacactgtctaaaacttctgagtgaacttgtctcccctgccacctgctcaatactccccaaaaagccacttaaaatcctaatgcatgatgcactccctcacctcgccctgtccagcctacaagccttttctaatccatacccactgtgttgcagcactggggtcattcttctattttgcccatgccattcctcatccctcttctggcaacagctcctctccccacatcacacggccacacccacaaggccaagatgggctagtcctgatactgagtccctgcagatacggtggtggctccaagggcagacgtgtaactcaaagcagtgccaaccagaagcactccctgataatgcccatgggcagaacaaagttgggatgccaaaccaggactaacactaccagaggtcgtggctaccaacatccctggtctccttgaggacacccatcttagcaggagaaaaggagtaaacacacagcaggaaggtaagcagaaacaaaagagaccctaatggggaaattctaggcagtactgaccctcggttccagcacctagggatctcatttctgtgtacatttttaagaaattgggtaagcatcccccacactacgatccttcccatcagtgggagaaaatattctccatatataaaatacaaattgtttagggggtttttatcacctggcaaaagaaactgcctaattaacccaccctatctccccattcttcctcagaaaaggagatgttccctcccctttccaagacccaggcaatcacatatccactggatctcctttctgcctagttcttacagaactgaataccatagtcatagcttactgtaaccttgtactcttgggcccaagcgatcctctcactcaaagcgctgcgactacaggtctgagccacggagctcggccaaaacctagttcttaagagatacctgcaactagtgcttaggatgggtatcagtccttcccacagtttagtttaagcttccttaggcccaaattccttccatttaaaaatcaaaatcacaaagcctttccttttgtcttcaatgacctcaaagctttttgcctctaggtctttcctccaggagtccacagctgactcaccattgacccacgttgtttttcctgcaatggactacaacgtaacttctccccatgctattccacagggtcaacaatgaccttctatttgccagatcctaacaatgttttgtcacacacacatacaaatgtccaaaaacaagatatgagcaaaagagattgctgggtgtcctagcattgaaatgcaggtgttgtcttgcagaccctgagggtggcggggaaaggattatctgattctacagcatgttcctccagttgacttgctactaaataagctattttacgacttacacccttaaaattcttacacccttattacttacatccttacaagctattccacacccttagagctttgtaaagatggatactgcagacaccccatagcaatgcaagtgttcctgtaccatggaaataatttgacgatattccagataattccagatgattcctgttcatagccatgcaactcaagtgtgctggggaaggaattttaaatctctccaagtcaaaatgaaccatttttcacatcttacagttcatctcattaatgaattgaataaaatatttgacatgtgttcagtctgcatgacagacatgattttaccatgtcaaaaactacacttcaactgctttccgtttgcatcatgcttgcactcttatctttcccctcatttagaaatttacatggcttgccttccagcatgtaacgcctcctacttcctatcctatctctctggccactgctcatctccctcatggggaatcgtctctctttgtttgccttcaatgctgcaattccccaaggtgctttcttcggttcttctccacaggtgtcactgagtgggtaaaatgagtgcaagtacttagcatagtagctgaccctttgtgaccctttgtgaatgctcaatgctgatggtattagtgtcactgtcaccatgtagtttttagattgctaaaattatgattttacaagcttttctccccctttgaagaacaggccctgtgttctgttcatcaatgcacccttagtatccaaagacattatgtctgaggaggaagagagcaccacagggttctagaaaggcatataatcatcttacatccaaatgtatttaatgaaagatgtatttaaaaggaccccaaacaagccttgttccctgacttgcaacatgcagtgaagttctggttgaaggtatggagggactcatttctacctccctctcccacttgccagatcatgggatctaagacccttacagctcagagtcactggtggctcgggatagcacagagaacagcactgttccacggaaacagaatgcaactgcctatggaacctcaatttcctcactgccacgtgaaacgtcaaaagaaacaagtgaaatcaattttaatcacatagttacaactcagtaacatttatgatgtatttaacaacatattcaaaacataactatttcaatgttaaacctatataaaaatgaatgtgatcattttacaggttttctcacattatatctttgagatacggtatctatcttacacttatagcacacatcagtttccactagccacatttcaagtgccaaacaaccacatagggccagtggctacagtactggacagcacacggctagaggctgcagcatggcagtctctgggagaacgaagatatatggtaggggacatagtgataaagcaagaaggtgatttgtttaaatgcaaatctacaatcactcctcttctctgaaaaaataaagtctaggccgggtgcgggtggctcacgcctgtaatcccagcactctgggaggccgaagagggtggatcgcaaggtcaggagttcgagaccagcctggccaacatggtgaaaccctgtctctactaaaaataaaaaaaatcccggcgtggtggcaggcgcctataatcccagctactcgggaggctgaggcaggagaatcatttgaacccaggaggcagaggttgcagtgagctgagattgtgccactgcactgcagcctgggccacaagagcaagactctgtctcaaaaacaaaagaaaaaaaaagaaaaaaataaatagataaaaaataaagtctagtgacttcctgttgctacaaaataaagcccaaatccattaaaatggctcacaaggtatgatgttttggccctttcttacttatggcgcctaatgttgaagaatctggctggtgtgtatcatccaacaagacttccgtgggtgggtggtaggcagaggacagataataccagaattgcaagaggaaggtgacagcaaagggctaattctccccactcatggtggccaccaacaatctggtaaagtccagaactgggaagaaccactctgtgctcaaccctttgatacagtttggctctgtgtccctacccaaatctcatgtcgaattgtaattcccagtgttggaagtggggtctggtgggaagggattggatcatgggggtggtttcaatgtttaagcaccatccctcgagtgctgtcccgtgacagtgttctcatgagatccgggtgtttgaaagtgtgtagcacctctcccttcacactctttctctttcttgctctggccatgtgaacatgtgtcttcttccccttcacctcctgccatgattctaagtttcctgaggcctccccagccatgcttcccatacagcctttggaaccgtgaaccacttaaacctcttttctttataaattacccagtctcaggtagtttattacagcaatgtgagaacagactaatacaccctgggacaaacaacaggctaagacagaaagtaaagctacccaggcattagtaggatctctaagtgaaacgggaaaagaggggtgttcctggggtcaagaagagtaatttttggtatggccaccatacaaatgtgaaaacatctggttattcatacgtgaaactaagggaagaaaaacttagatgcaaactatgacacatgtatcaaaatagtcgattcaccagaaaaggacaatttggtcaatgtcataaactaaattttaattctagcctttaaaaaaagtttatttgacactcagaatacatagtctgtatgcatatatcaaaaaaatggtatcaaaaacatataagtatgcacagagttctgatttataaaatttataacttatctacacaattgtactacaagaactcttcagcagaatgtaaatattatttctaacattgacactttataaaagtcacacccaggcaaaagctgatttattatcaatccatacttagtaaatcagcacacagaatgttcttgtaaaaatacatataatggaccatacgtggtagctcacggctataatcccagcactttgggaggctgacatgggtggatcacaatgtcagtagttcaagaccagcctggccaatatggtgaaaccctgtctctactaaaaatacaaaaaaatttagctgggcgtggtggcgggtgcctatagtcccatctactcaggaggctgaggcaggagaatcatttatacccgggaggtggaggttgcagtaagctgagattgcaccactgcactccatcctgggcgacagagcaagatgtcatctcaaaaaaaaacaaaacaaaacaaaaaatacatataatgaacttaagtattagtgatttccactattcatcatttcacatcatggttcatactcctttcaagataaaaattacttaatatgtaatatattgtgataatgtagatgctttttgcttctcaaaacaccaattagtaattagagcttgtcctttcttaaacagagcgctatcaaaacaaattaaaccttttaataataataattttagtatttacaatttaaaataaaaggatctcaatagaatagtaatattaattaaacaacaaacattcattatccaagtaggctaaagaaaaatttctagtacaaaaaggattacaacaaaagaaaatgttgccaggctatctgctgtttataatgagtgtcgagaattctgctttgccaacaagcataagactaattacttctaatgttcttaagatgcagtcacaatgcagagataactatctaagaagtgtgagataaaatgcctggaactccagctattttaaattgaataagaaaggagcaccctgtatagtaacagcaaaaagactacaaagaattaaacaaaaatgaagatctccacgaaatgacaaaggatgatttccaggatacaaagttaagttaaaaaaaaaaaaaaaaaaaaaagcaaagtgcagaacagtgaactttgtactttttttgtacaagaaggaaaaatatgtattttcttttgccaaaaaaataaatcaggaacaatgaaaatgtttatcaatagagaatgagtgaaaagtgagctttctgagtatatttcatagaactaacatgatagtcaaaaagtaaaattaataagggaggaaaaaaccaaactataatagaatacaaacagatacaaatgaactaaaatatgtatcaagctggtaacagaaaaaaattaatgctagcacttttaaccaaaagaccttgactgtagagccgtggtgagatatatactgaagatgaaaggagtgtggagggctgagcatggtggctcatacccgtaatctcagcactttgggaggtccagccagaggatcgcttgagcccaggagtttcagacagcctggccaacacaaggagaccccatctctactaaaaattaaaaaaaatcagtcaggcctggtggcatgtgcctatagtccagctacttgggaggctgaggtgggaggattgcttgagcccagtaggtcaaggctacagtaagccataatcttgccactgcactccaacctgggtgacagagtgaggaaaaaaaaaagtgctgtgacatcttaaactactgtttagtgatggtcataatacgacatcataattttaaaaacatttatatgtatatcatagggtaatgcaaataaatatattaatggtatggtgaatcattaggaaccaagatttttactgtagggttaaaatactgatgcaaaatacaagaagttaaattttttgaaaacaaatgcatgtgatccaacgtgaattgctagccaccggacaggacttacttcttggcaatactgcaggatgccttccttggtatcaatgcaggttttggtccctgatggatctgaatcccacttcccattctggacattcatgtgcatgttcagtctgccacagaacatggcaatctggggttcagccagcaggccagcattaccatcagtgggtacctgaaagaagaagcttcagttagttatagtatccatagctccaaggcagaggcttggaggaagaacagggataactatcaaaaagagttctattcttgctcattctcaattaggaatcagcccggtcttcaacactcctttagattaagtgttatgtatgctacagatgttcttagccacctataaggcaatgctttcttttatactaaaacagagaaggaaattaccaataccgaaaggaatttattcatgaaaaatttacacgttttcccatatgagattttgtggtacctgctgaaaggttctgacaacaaaattacacgttttcctataataaatataatcactgtggaggctaccgcattcttataataaactccactgactcacacagagcatgatgcctgccaggccctgcctgatgaccaagactgaaaataatatttgtgccacctctcagcactgagagcaagtatggcgttggtagttagcaagtgactgtattatgattttgaacagaaaaattcactgtagaattcaccatccacaaatataactgagtatgttggcgatccctcctggtttcccccagaatattctctggttatcagtctcaactcttaacaagtctgttaagagtgctggtgtctcctctcccaaccatctgcaaggagccaacattttctcatttggagctctacatagtgcctgctgggtagtaagtaaggggtcctagctattaccattgcaggcaatagaccacttcacaaaataacttcatgaaaaagggtgccttctgtattttcaaactcttctgtgtacaggcattacctttacaaaaatatttttaaaagagaaaatggaagtcctgaaatatctataccgtgtcacttaacaggttctggtatctcaaaaagaaaaaaaaattcagcaagaaatgaaaaatatatccacaggagtaaaggtgttattaaaccaatcaattagaaggcatattaatcatgataggccctcccttgtcaaatccagctgctggggaaatgtgagacacccatgccaagaagaattaacttccagcagaagccattcgttcacacactcaagaactgggtgattccacgataacttgtatcattcctaaaaactgtccacaggaggaaaaacaccaactaaaattgcactgagaaattttcagttaaagaaatgaaacagtttccaaacatttcttcccacataaatgtaaaataagatacctctggccattttagtcatttttacacatacttcgtcaaaacccaacagaggacttaggtccttacaacaaaaaaacaaaacaggtcttagattgaaccaagtcatgagtgcaaaagctgctggcaaaatctctagagccatgttttcaagtaacttttccaatatttaacgaaattctgcctttacattgccagatggttaagtcaaagcagccgatgccaaaatatccagatcatctgcagaaatagctagaacccctcaactccatctgagccccttgccacttcctgtgacttccatgaaactggggggtctcattctctgacagatgcaaagcagcaggctaagtagaatgctctataaatttaaatttcacagctttcctgagggattaagaggaaattcattgtcttgatcttagaaatcgaaatgcaaatgttgtcaatcttactgaaataagtagtatagataataacactgcaaaaacattaaagaaagtcaaataataatcagatacctgtggataaggccctacatcagatgctatggagggccctgcccgtaaggaatgtacaatccactaatggaatcgccattgttcccacagtactttattctgttcaccttccgaattcattcctgtcccaaagatttccagtcttggcagcatgttgttaactgtacggagacactaatgagcctttaccatagctggtaaatattctgttgaaacagtctcctcctctgcctcaaactctctctgtacttttgtttatccacaatctgttcattacaatgtctaaggaaagcgttctaccttcttgtcaatacaaatgcacttgattccatttcctccccgcaaggagaggaaattgacaatttctctccccagggtagccagcctccaagaaggcccccaatagtccctgcctcctgctattcatggaccctgggaaactccacaatgtatcagggtctgtctgtgcaacaaatggagtacagcagaagtgatgatggtgtaacttccgagcatgtatatattagacttaaagatgctgcaactcttttaaaaacaaaccctttgctaccagaaaggtcactgaagggcatgatgatgtgtaacatccaaaacaaggtcatgaagggcatcacaattcttcattgctctctgggatcactcactgtgagggaggtcatcagctgccatgttctgagacatttggtgctaaaaccaggaaagtttttggcaaaatacactggatcaccctacctgacaaaccaagtaaatgcttcatttttttttcctcttttgacttaacttcctttgatttcttctatttttcactttgtcatcctccctgcttcttgactttacagctattttaatgtcatctgttggcatatgtgtgtatgctgactatcaaaaagtggtaattttttaaacatttttttcaaataaatttattatgaccctataattgtctcatgttcttgccattttttaatgccatctgttggcatatgtgtgtatgttgactaccaaaaagtggtaatttttaaaacatttttttcaaataacttgattacggcgctataactgtctcatgttgtcttcattttaacaatgagagtttagactagaaaatatatgcttcagttcctgtcaggttttccaccagatgagatttaatattaactttaaaaataaatgtttggagaatcgtgatgattaacatgctctattttcttcaagtggagatcatttaataatttaaactgcgaatcctcaataatagggtaagctgttgaattagaaattgtaaaattggttgtgtgtatagatcttcttacatttgacattacaagaggcccttcacaaataaatatcaactcacaaaagccatgtttctcaagtaaaattttttccccccgaaccaacaccagatgtgtatatggaaatcagagcaattagcttggagatacaaattgaaccagaaaccttcctattcttactgaagcccatctgcaaacaattccatgctttcactacatatgcctgtctccctgaattaaaacaagacaaacaactcacggcatcctcacctgcatcaaataacccatttatgaaacaaagcctggttgctaagcgcagccactccctggcattcagccagaaggaaatgtggccacattaaacattgccatccaagggttaactcccttttcctgagtgaagcctccaagaaatgacttaataaatgatacacagggtcctattcaggatctgttaatatggacactcttaaaattgaaatcttttaagattcaatttacctgccaaatacctgaaatctggcaggtatttgctgccagtaaaaaagcacagtcttacaaagtcatcctaaagataattattcctaattttttaaacatttttattttctaaaagaaaagaaatataaataccttagtagatgggaaatataaccacttaactactacattttagttctatttatgtcttaacactattctaaggtgagttaagattactttgcaaaaatctaagacaacatttaaaagatgagaactgtgatataactggccgtttgtggtctatgcttttctaagactgaatatgaaggtaattcttgtaaactgaatgacttgccactgacatcataaaactggagatgctttcccatgggaaaacagtgttcctgacaatgaacaaaataaccagctaaaaacaatgaagcattcataaattgcctcaaaagcaagaggctgtttaccaagtgctctgaactacagagacgtacatatcaaacttaaaaatgctacaagtcttaaaaacagaaagaaaatatttttgttaccagaaaaaaaatatttttgagccacaatataaagaatactgaagtgaaatggactttccaaagcaatttttagaaatggctttaaaagaggcttaaggggataacataaacgaatataaacatatatacctaatctggaccagtctgcagatgtgaatctggaaaccctacgcctacagttgctacaattttcaattaaatgcaaagccaccttcttgaacaagttctcttgttgtcctttcaaacagggtgttccctttctccaaaaagtttctctctgttatcatctaggagatcaaaattccttatagagcaggcttggcagcattcctccccaacagggtctcaactaggagggaaaagtgaacaaggagctctctgttttgctagctgagaggtcctgtttggcaaggagagggcacagatccatagcttagttgcatccgtggatttatgtaattttaaggtttctggctaatgaaagccatctgttttctgcatttgaaccacccgctgactagtctaaatagctggcctcatataatgaagtatttggtactttttaatcagttcaaacttcttcgagtcagattcttgcataatctcagtatttttttttggatacactgtcacactccaccacccagactagagtgcagtggcatgatctcggctcactgcaacctctccgcctcctaggttcaagctattctcctgcctcagcctcccaagtagctgggactacaggcctgtgccaccacgcccagataatttttgtatttttagtagagacagggtttcaccatgttggccaggctggtctcgaactcctggcctcaagtgatcctcctgcctcggcctcccaaaatgttgggattacaggcatgagccactgtgcccagctttgtagcgatactatttctatcacatccatggtttcctgacataaatactggattcccttaacctgggcataattcaactataccccacaagagtgctttacattttcatattaaaacatttaaattctccattgtcaaatgtaaagaactattttctagaatcataatctagaaaatctgagtgaacccctttcaggggaataattcatctgtagggttttcttttaaatgccaaaaaagtatttccagtgtaagcggaacatctgcagttgctcatttcatcactaacagagaactgaaattaaaatcagaatcacaaaagtggaccataagagggaggaaagggcaccaggtaaggatatgtccaaggccatggggttatagggacagagaagggaattcaacctattccgtcaagggttctgttaatgtgaccgggctgtctctcaaattaaaatggaaaattgcaattttccaaggctttgcccctgtgtgtgtgtgtgcatgtatttgtggtgagcaaaaatagagaagctattaaaaaagaaaaataaaatgtgatgactgaaactgcaagtggtttctatttacccttgtggagagttgccacatctattcacagccactatttgctacacaattatttcagagcttgagtttcggcttaaaaaatgatttgccatgaaagcgaataggagaaaaacaattcctttcagaggagtaatctacatatttcactcctggaaacctgaaattctttttgggtcactgttgatctggcttctaattacaagctatcctcccttgatgtttttcacggcctctgttgatattagattggtgcaaaaatcgcaattacttttgtgccaacctaataccaagcttttttactactcaaaggatagatgttctcaagttgacccaaaactcctacccactcataagaaggccagtaagtcatgcttgctgctggtgcccagtaggaaatcaagaggtccctcaataggagtctttgttattcactactcgtgaaattaataaccaacatttgaagcatgcatttaggcaggacccagtaagagtggcatctactgctaggactgatataaatgaatataaaagtggaattacaaaaaatagagccttatgcatggcaaacaaactcttagcctcaaaaacagtttacaatctagtcaatgtccatttagtcttaaaaggtgaatgttttcttttaacttcatatatatacatacacacacactaacatatatgaaaccatacacatactatatagtatgtgatgaaatgagcgagatgtaaaaagttcatctctttcattctgtctttacagtttttctgtgtgtcttttgttttgtttcgttttctgagacagagtcttgctcagtcgcccaggctggagtgcagcggggtgatctcggctcaccgcaacctctgcctcctgggttcaagcgattcttgtgctttaacctcctgagtagctgggactacaggcgtgcaccactacgcctggctaatttttgtattttttagtagagacgggtttttgccatgttgccactcctgacctcaagtgatctgcccgcctcggcctcccaaagtgctgggattatacgcatgagccacaacgcctggcctgtctttaaagttttactgacatgtctcatacagtcaccaaagggaaaaaaaaatgaaaaaaaaatatatatatagtatttgagatctttatcctattctgactctctcaatattgccatatctcatcagccttgaccttgtgaacatgcagatagaaaaagggttagaggcaaaaatcaaagacctactaaggcctttgctcattatctcatttgactcagaaaaaccaagataagtcacttccacatctatttagataatcagaagggctcaaaacccgcctagagtctactcaagagtgttattccaaagcacatgcttgctttttgacagaacaagccagctggcattcctggtactagatgtcaagcttttttaattcttcaatcttgaatattattttcaagtaatttttcccccatggcagtactattttgcatgtctttgttactggcttttaaaaaaattacttttagagcaagtaaaacgggaagcaaacccacagcttaaatgtctaatttgcatttctcaaatttaaatcactagatgttaatatctactaacctctggtagtttcctctttaagaaatctctcctgaaatgcaaacacaaatttctccaaagttagttctttccttaaatctaatgcagccaactgaatctgcaaagtagaagtccaaatctcccaatgttccaactactaatgtttatcaacccttactttatttaatgtgtattttctagtttttcaacagttgacatatacctacctatgtacatatacacatgtatatatacctgctatacagctacttgtatggtatgtagtgggagtgctagaatgaacacacacacacacacacacatatacacacagtttaagagctcaatttgcacaaatctcaaatgctggtactttgctaagatctcattctagaattagtgcatttaagtccatgttgctaacaaggtggaggacttggtaactgggctcctcagagagagtggtttgaatggcattcactgaaataaatttgatagtaacaaataaatgattttccagtatggcttctacttgttctgacagctaggacagattagcacccagcacagaatacaacaaagaaaaatcaaaatctattattcctcttcatttttggtacaagagatattctacatatattcaatttctaaatttctactgttttatatcaaatgtagccaagctaagccgggatcagctgacccttgagcttgtgggctataataaatggttattgttctaagccactaaattttggagtgagtttgtggctttgcagcatttttgtggcaaaagaaattaacacagtcatgtatttgataggaataactaaaatactaagtgatagaatcaaggcatagattgtttcagaaggtagaaactttctcaagttgcctttttttaggcagctgggagtacaggcccataccaccatacctggctaatttttctgtagagacaaggtctcagtatgttgccgaggctggtctcaacttcctggcctcaagtgttcctcctgccttggtctcctaaagtgctgggattacagaactggtcaccatgcctggccataaatattttatatttaatgtattatgtaaggtaggatcagttatggcttatgatctatacactttgggttgtcctagaattggaaagaatctgagcagaggcaaatagaatgatactgtaaacacatgtactgaagcttttaaggagatggtaatcaatctttgcaatctttagatctgattgattttgtgagcttcttttctcctacattttttagacctctgcaaatgataaacaatttgtacaaaggcatagtttttaaaaaaaattaaacatattttgtttacacaatatatttctaaaaggaaatatttcaaatctgaaagcaatctaatgctattaaatagaccccgttcctgctcatacctcacatgtggctatgtgaatacaaaaatcttataattatacttctcccagcaaaggacatgcaaatttcatcaccaaacattcatgctactgcaatcacactccatcaagccatatgtgttgaaatctgtgtaacaaaagcagtgagggctcttgccacacgtaggctcccgcccagccctctccgggaggtaggtatgtatgcagagaagagagtgggctgagaaatggaattctggcatgttgggtcaagcagactgatcatgtgacactcgcactgagatcctaccaaatttcaccatgtggcagagtcagcaccaaacaaatcccaaagttaaagcctcagttatcacctgggttttgctgcatagacctagccaaatatgtgtaagagttatgagctctagacataatttattttattgccctgaaatagagtatccccacataatttgcaagtttaattgcaattatattcctgggggtcactcctcatacctgcacagttaggatattgccaggttattcatggtacctcacacaacacctggcagttatacacagatcctcatcttttttttttggagacggagtctcactctgtcgcccaggctggagtgcagtagcgtgatctcagctcactgcaacctccacttccctggttcaagcgattctcctgcctcagcctcctgagtagctgggattacaggcgcgcgtcaccacacccggctaatttttgtatttttagtagagatggggtttcatcatgttggtcaggctgatctcgaactcctgacctcgtgagccaccgcgcctggccttacagatcctcatcttttatgcaatatcatattcatcactaaataacgacacagcataaaaatgaacttttactttatcagtggtactttacagcactacagtgagttttctagagtttaaggcttacgctaatatgcttaatgcacaagtaagtgcaaacttaacaggtttctttctggttcttttatttttcccctctatttcttctcattgacccactgcaatgttgacccactcggaacgtagagcatgggcaaaaaaaagaaccaagagaccattagagaagagaataagtctttgaaaagctgcaggtgggaatataatggaaaacaagattccagaagaggtagtgggtctaccatttaactagaacatgcccagtagagccatactgataaatctgcatcttagagttgctgatatacttggacaaggggaaaaagaagcatattcctctatcctttgtcagcccagaaatttatcccaaccctattttcctatacagtttctaccagctttcaggcgtcaggccattgtaaaaccaacataggtggagagggcaattcaggctaggatggggagaggtagttagcgggatttccagttctgggctatagtgagggagtcagtatacactgctgagtctggtacatacattccacattgtccataccctttaatatctttacaatttctaataccaaagtggtatgaaaatactaatgaagttaaagacccttaccaaaatgctaattttccaggttaagttatcatattgtcttcaatgtgcattaaaatctcagagcagctatcgggggataaggagagtgagtacccactaagcttggaggccagctaaactctctagaaagtcatttccatctgacttcccaccagcatgaggcagagcagttcagagcatttttcaagtgagtcggcctgccgttaccaatgccaaatttaaagcacttatatgttttatcacaagcccatgagcttgtgatttcataaaatggtactaactggtccttgccatgagtaaattcaagtaacacgtatgaagaagattttaataaaattttttattagaagattttaataaaatttttttattaaaagattttaataaaattttttattttattaaaagatttcttaaaggtcattaacgcaagtcatattagaagagatcacaggcaagtagacaaaaagaatttactccgtgaaagctcactgaaacaggaattcggatatttgacatttacttttgttcttgtctctcatatgtacacatcaaagcacacacattcacatggatgtaaagatagtaagaggccacctgcaatcagaacaagtgagattataaataagtatattatataagaatccaagacaagaattccttacttttaaggaaagggcatcagagatttatgatcttagacctttacctttctatttttagcagatttacagaaatattgcaggaacagaacatgaagtcacttatttttgataagcacaaaggatatttacattatatcgtctggtttatttcctttcaaagtgtcataacatttactcatcagcctttactgtgtgcttataactctcatactgttgtggttttattactaggatttttggtctaggagaaagctgctttacaaacataatagaaattcagtgagaatattaacttgacataaaaacccaagataattttcaaacagcattcttgttcattgttcaaattgtattctgttaacttatttagtttaagccaagattacttcttttcctgcagacttggaacactaaagaatactccaggtttaaattccaggttatttgcttgataagcctgggtagattgtccttcttaaataacttacaccaaagcactatcaaagaagctctccctttgtagagccctcagattcacagaaggaatttttcgaattgccatttctataggaataaaggctatcaggaaccacaatactaggagaaaataattctgaaggggaggtagcagtgaagactcttatttctattttcttgactatatttataaaaaattgttgccgaaagaacagaagaccaagagccaaaaatcacactgcagtcttactcttggatgtaatgttactatcagtttcagtgacacaacatcagaggcaatctgatattgacaatggtaaaaatatgcagacgccaatattaggagggtgcagttagttgacagtagagcctataagtattcatctaagttttctctgtttgaagagaagaaaagagaacatcaaacatttctagtatatagagcaaggattcctaatctttttttttttttaatgtgcaaacaagacaaaagttacttcactgtctaggggttattccctactctttagcactggcctgactctctcactcccacatataagcattcaataaatacttatgccaacaattaagaaacacctggcatgaaaaataataacagtaataaactagaaggtagaaaatgtaattattgacaaaggtgtggaacaatacaaaataaattccactttagatacctgtgaaattttttattgtggcaccaggagagtaatttcctaacagagaaaagaaaacatagcatccacacctctgtctttaccaattcctaaataccagctacagttcaacttgtccacggacttcaggctcctcctagaaaacaagaaggcttaaaaagcaagacaacctattagctatgttgctcaataaatttcaatgttaatttcctaattctttgataacacattcctgaactcctttgtaattcaggcaacattttaaaaatcagatgatctaactggactccaagaattacataaacagtgtgagcagtgagacttcgaatgtgcaatcaactatttttttaatcctgctgctaaaagccttcagtagcacagaactggttgtcagagatttcagtgtaacctaacacctaacgtgaatgactgctgtacaaaaatacagctgaaaatactatgaggaagagatagaaacggattgttgatggctaagcaaaacagcaaatgctgatggttatcaaacacatgccgttcccactctacacagataagatttcaaagctgtttgagtcctaggttaagttttgggcaagttctggcttgatgccttatattcagataaacattttccaggcagtgaacatattcaaagttggggacagtggggtaacccgaaaacattcctgaccttgatggacagataatccaatggtggagacacaaataaggccaaattggctaaccaaaggtgctggagtgttaatgcagaggtctggcaagggtacaccgaagagctctcaggaaagagtgactggtttgacttggagaaggagaaggaaggcagaccaaagatcagagcagaaaacatgcccaggctgagtatgggtcggacaggaagcatgaaaggtagcacaaggctagcgtccaaatgaccttgaatttgtaataaacgtgtgaagtcactgggagctgctgccacattccaaagcaagcaagagcagcatcccaccagtgtatgaggaggatgcgggggccccaggacaactttcgtgggcctctttctctcttaaaaaaacattaaaagctatattttagggctctgttgattggtataaagacaactctaagtcaggctggattcattattgtatattcatgattattatcttgttctttatttttccttctgattttaaaagaaattaaacatttttgagggctcctaaaggtactgcacagccaagactacggtctgactggaagcaccaggagtaacaggaggcagtaaacaggagtggaggtagggaagattctaaggcttgtaaatttcaaggatgagcacattcggtgcggtgtttagggggtgagtctagagtgctttcatggccaaggtcaacaggcattattagagtgcaccaggctacagaatgtgagtttgtcctgacgggggtgggggagaaaaagaaggaaaacaatcactacctccctgatttattagcaaacatcccattctgtctagccccacatcacatcaggagttctaagagtcaatctggcagagcaattcatctacgtttcattgccttgagtgatgggaacttattttaattttcaaaactagcatatgtttaacagacttgtgcagagctgcctatgtgacctggggaaaaaattatctggactctcaccatgcagattatcagcttgaattgctaatgcattccttacccccgacggatgtctttttgacatgtctacagaggaataagccctaaaacacagaaataacaaactgtacaatctatatctcgcccttgggcaggaggggtattgcactgtgtgggaaagatttacattctaccaaaaaatctaagcaaagagtatttacataagcacaaaaattttttcacaaacttgttcaaataaactaagagaagaacacaactgtgatcgcaaaacagataacatcacatagattctggcttctgactttactgctgttgttcatagcatgtaattctagataataagaattttaggtaattagaatagaagtgcctcttcagatgtgctaaaatgttacgtgcatggctgtttctaaagagggaataatgttggtgtacacctaacgctaaccaactgtgccctaatgaaggtaaatccccaaatatccataacactcactttgttttctgtgtacggccaatctccagtcaagagctcctttaccctgacactagtctcacccatgttgttcagctatgcagtggttctccaacagggtaagcttgttaactacatgggtcctaggccactttgctttttgagccctatgaactgtttctaggtagaggttcaaagttcttggcaaagatgattgtcacgacttgggtggtgctactggcatctatctagtaggtagaagctagggatgttactaaacatcctacaatgtacaggcagcctccgctgtaggccctcccccacccaacataaacaattatttggctcaaaatgtcagtaattcccaggttgaaaactccaacctaagcctttacttagggggaaagagtcatgtcttactgttctctgtatttctatttgttcacagaacaaaattagcattcaaatattggttgaaccaaacagagtttccactcaaaacataattaatccaactgacatcatataaaacaataactatgtaaactgtaaatcctacaaaatacagcctcccttccacagaagcaaaaaaaaaaaacgttaatttttaaaaggtagttggtgtatcaaaagttattaacattaagcaagataaccccttcaactcaagattacagaagattgccccataattatttcatataaaatgatcaaaaataattttattgtattaactccctgtgggtcaatttataatagtaatcttttaattaagaaatcttgagggttaattatccagctttcatttaaaaaaaaaaaatgaggtggtaactatttctgggcaaagttcaccaggaagcaagacaatgcactcataactagggttccaagaccaagcaagccagtcagaatctctctgtaggtaaagactttcaaattctagccaatcatttcataatgaacaacttagacaaacggagaaaaggcttaaaaactggaatctctttgaataatgtattaactctactggaataacaaatatatactaataggttacataaatcaaaagccctatgaaaatatataactaaaaaaattattgctagaaacctctctatgtcttgtatctgcaactatgaacagggtctaatccatcactgtctatatctctagagacctcaggggacttacagctgggtcagggtcactgtaggaactggctgaagggacccacacatgaaagtaccaatatgatctttggaatcaaaaggcaaaagtcaattctgtatttagtaattaccagctgtttggagaaagccagttaactttacctcttgatttcctttatctctcaaatggacatagtaacatcccacctcacaggatattatgaggattaaaatgcagtaatatacataaaatggagagtaagcactttaagagctaatcatattgtctcaacttgtatctagcaggaagagggaaaagaaaagaaaactaaaatgagcacgttcgtaagacatctggggagcctgaactgatgaatacacagcatttgaaatctcctgcgagctatccctacaaagatacctgctatttattcaggaaccctgagagaggatttcctgcactaaagaaaatgctgactatataaccacatatgacacactggtttaaagaatgtcttatgccatttaaaatagacaatctttccttgtttatctgcaagacgtctgcctgccaagttgtctctaaaagagacaaactggtaacgacactgcaacacgtgtgtcgtcaaccccagctacacgctcagtgtggcagatctgactcaccaagtctacatagtatttttaaactatctaagatattttaactcatgcagtttaatggcaattttagctcttttcagaatgtctgatataaggttcatgaagtccactctgacaatttactatccgtgaatcacaatgattctaaacagagctaagaagcaaatttcaagatattaaatttttttggttcatttctttagccacagtattaaatttgtttctacacagaacttctcttgtgtaagaaatttgttattgcatgcttataccactaagttattaaatatatcactagtaatgtatactcaaaatggcccagtgaggtttaagacattcgtttcgaagtatgaataaatgcctcatttcatatctaattcagtgttctcaaaaacagttttcagaaaatgtcaacagttattacctgggagtggggagaattctgtcataaaacacatatgggaaatggatcattcaagatggatactggaggcttttgaaaaaaaaaaccgtaataatgaagtcagtttaacttttttaaaaccaaggtttcccaaaatgtatttgaccgtgggccacttccattgtgacacatttaacatgcttggaactgaatttgaaaaatgtactaagagatttgaaatggatgatcaagcaaaacttaaccagatcattctgagtgaaacaaaataaacaaaaccaaaagaagccttaaagggaacaaaagcaggagtgttaccaagctcctgcagaaatgatgattataataacacatcagatttggctctaggcaaaataattacatgacatgaagaattgagagcaagaaaagagaggattagaatgaaggagtgtttccaaaggcctaaaatatttcagaagcaaatcatgagcattcagaaaatgccaaaagggtacaagtcaagaattttataaggtcccaatgcagtgtaaaattccaggtcttggacaggcaccatggctcacgcctgtaatcccagcactttgggaagccgaggcaggtggatcatgaggttaggagttcaagaccagcctggccaagatggtgaaaccccgtctctactaaaaatacaaaaattagccatgcgtggtggcagctgcctgtaatcccagctactcaggaggctgaagcagagaattgcttgaacccgggaggcagaggttgcagtgagctgagatcacaccatgtattccagcctgggtgacagagtgagactccgtttcaaaaaaaaaaaaaaatttcaggtcttaggtcttttaaactatacaggtgaactaaatcatggtggtttgttccaaactaagttaaattttcacttagcgatataaacgtgagatggctaatgacaagcagatgcacaaattttatcacatccctggattcctaaattgcatttgtgaaattcaataaagtgacacgaagtatagacaataagtgaataagaactaagaacagaaaaagtagaagacatggatatctgcagcaaagcccacacccgaggggagaaaaacattagtgctgttgtttccatgatacgagcacaggttcctacactgatttcacaataaaaaatacaaattacttctaattttcccattttcacacaagtgaaagagagttcagcccaatttctgaattaaattttccttcctatagagggaaggtctttagaaaatctttacaaaatagtactacacatgccttgtgatattagggtgatacggtgataaattaaaagcaacaggtaattaatatgattaatgtaatacccagagaacttcactatttcttaaatgttttcctgagatgttatattgaaacgttgtgctaaatgtcattacataaaatgttgagcatcacacaacagctgacaaactaaccttccaaaaagaaaggaatagatggtcattcacacgaaggttacattttacaaacaaaactggacacacaataccattctgtgatgtttaagatacaacaaaacatgtactgcttttttaaaaattgctgtaatgaggctctcacagttattcacgttttatttagctacaagttttaagatatctgtgaaagaaaacttctttgttttaagttcttgtttgaagatcaccaagcttctatagtgtctctctgaagtggtgacacgctgacttccaggcacaagccaggcacaagagaagctctgcaggaaacagcaaggccactctccataaggagacaggcttggccatgacaactgtggcttagagctgaggagcacagcaactcacaactaatgtctttgaattttaggtaccagcactgagaatcaagttcctttccatgttttaagaaactaataaaatcctcaagaagacctgttttagatattcatgacatttcctaaggcattctataatgttaaaatacttagaaatgactcaaccatttggctaagcttacgctaagggcaaattcctgtttctagatgcgtcaggtctggacagcaccaatatgtgagcttcaacacccagagacttgacttctatttagcaatttatatttttagtagtagccttcccttccttccttccttactatcacagaaaagaacaaagaaaaaaaaattctgcttcaaaagccaaagagttcactactaagaataaattctattatcttccttagactatgcctattactgggtaatataaatatatgttgttggtcagatgcagtggctcccgcctgtaatcccagcactttgggaggccgaggcaggtggatcacgtgaggtcgggagttcgagaccagcctgaccaacatggagaaaccccttctctactaaaaatataaaattagctgggcgtggtggcactcacccgtaatcccagctactcaggaggctgaggcaggagaatcgcttgaacccaggaggcggaggttgcggtgagccaagatcgcaccactgcactccggcccaggtaacaagagcgaaacgccacctcaaaaaataaataaataaataaataaattaattaattaatttaaaaaaaaaggtctgttgtcaatgaagtagtgaaaaggcccgtaaaacaaaacacttcattatttaccaaaggagcaccgaggttttccagcgaaatgcaaccattttattgttcacagtgattctataaacgtttttcctttaagacaattgcgcatagagcaatacactcagtcagtcactcatatatttgttggctctttttactaagccaaaacaaagattattaaactcttattagagacaacaacagtgtaatggaggcatgcttaaataagggaaataagaaaatttatactatactgagtataatttaagcattgatagccaaatgaccaatacggcaatacttgagaaatgtccagtcataagaagctcctctgaacgataaagccaaacttactgacaactgacttgaactaatacctaattcaagtcatctgagagatctaaccaactgttctcatcagtgagaaacattatatgttatctattgcacaatatgactgaaagatagtcatgtcttgaatctcaaatcttcagaatgataaaccacaaaactctactttgacacctaatgtatacagatgaatgtctgtctacttcctactggaatcgtgatagttgaattaagatttttttttttttcactcagatcctgttttcttaaataaggaaaaacaataataaacttaccatattaaacaactaaaaatcagttgtccatagatgacaaatgtgatacaatctagctgtcactagataaaaggttaattttgtaaacagagtcagttaaaaaaataaacaaaaaaataagcaatttaagataaaagtactttggcatggtgagacattacactcactggggccaggagttcaaggctgtagtttgctatgatcgagcctgtgaatagctactgcactccagcctcacatagggagaccctatctctttaaaaaagaaaaaagtgatgtctcaaatatggtgtttgggactcactaaaaataactaaatttaagggggaaagattaaattggtattatatatgccatatgcttaaattctgattttagctcaaccttataattaaatctgtactttgcacccattagacatttcagcaaactgaagttcattcaaatcaaaatctacaaaaagaacaagatcccaaggcactgaattagacttttaatattcaagatgtaaaataggcactcttttaagaaattacttttagttctcctctacctttaaaaaaaagtttctctcctactcgtgaactaattcagaactttacatttctgttacacagcatatgatttctgctttattacttggatatctgtttagtattcacaacatatatgtatctccattaagcccagaattctttgacagatggtctcacccaaagaactcataaatacttgattacttcaacttagtttgcaaaaattaaaaaatcagtaaattatgttacagactatagtattttgagtgttaaaatcacttctaaagaacaccatcacaacagaaccctaaattcagaatcgggttgacatggtctaagaaagtgaataaacgggtaagtgatcttcctagtgcatcatattctacactaaaaattcaccatttatacttcatttctgaaactcaatgtcaaagagaagattaaaaatctgggggctgggcacagtggctcatgcctgtaatcacagcacttagggaggcatgggtgggtagatccctgagctcaggagttggagaccagcctgggcaacatggcaaaaccccgtctctaaaaaaagatacaaaaattagctgggcatggtggtgcatgcctgtagtcccagctacttaggaggctgtggagggaggatcgcttgagcccagcaggtcaaggctgcagtcagccaagattgtgccactgcactccagcagagtaaaaccctgccccatctctcaaagacaaaacaaaacaaaacatctgacagttcctgagtaatcggcagcctacgtaaggaacctattaatactgcatatgcaatttttattaacacacttgccaatatcctcattttaggactagtctaatgtttgtatgatgccagactaattttgaatgtctgaattattcacaattactaggaagacaaatcattagactatggattcagtctacaatcttattctatatcttttggctatgttaactgattaacaactagaataggccgggcgcggtggctcatgcctgtaatcccagcactttgggaggccgaggcgggtgggatcatgaggtcaggagttgaagaccagcctggccaagatggtgaaacctcatctctactaaaaatacaaaaactacagcacgcttgtaatcccagctactcgggaggctgaggcaggagaatcgcttgaacctgaggggcagaggttgcagtgagccgagatcgcaccactgcactccagcctgggcgacagagcgagactctgtctcagaaacaaaacaaaacaaataactggaataaagaaaacagttccctgtccgtatcaaaccaatcagaaccaatataagaaaatgctcttccaccaaaatacagatttgatatggttgaccagataatacatttctcttcctggccctaatctagaacttaacttggttgtgactttgatttctgacatttacaaaatggcattcagtcctttataacccattgacttcgcttatgttgaaattcctttgcaggagtttccaaacatgttaaagtacagcatttggaggagaagcaatgtttgcctcctggactcaagcgatcttcccactcagcctcctgagtagctggaaccacaggtgcacaccaccactcccagctatatttgtagagatgaggtctccctatgttgcccaggctcatgacaaggaatactgcatgccaataatggatgccagctgagtgtcctctaattcaactggattctgacactgtacttggagattacacatcccacaggctgagggctcagtaccacaaaactcccccaacttcagatgtcaatcacaagccccaggttgtagcctgtgcttctgaccaactggctaccattccccagaccccttacttcgttttgattcattgctggagcaccttcagagaactaagagaaatacttgcttacattcacccatttattttaaaggatattacaaaggacacacagatgaacagccagatggaagagatgcacggggtgaggtgcggctgaagagaaaacgagattccatgccctttcctgacatccaaccctccaggaacctccatgtgttcagctatctggaagttcccagaacgcggtccttcagggttgttaagaaagcttcattatgtaggtatcattgatcattagtttatcaactcaaacttcagctcctggaggttggggagggtgactgaaagtcctaaccctctaatcacatggtaggttacccagccaccagtcatctcattagcatataagaccttcttagcactggagattccaaggattttaggagctaaatgtcaggaaacatatacatcaggaagaccaaatagatgccacagtatcacatgaccattttcttggagtcaagatatttgttcttccttaaaacttcgatgtttctaaatatccaaggtatccacataaggttaaaaataaacttctcaccactccacttgtcatttaaaatcatccaacattttaacatttcatcaaatctctatatctatacaatagtgcccatctcttcatgtttttaagagccctgtcctcacactattcttagtgaatagacagcaagagatattattcccttcttacaattatgctctgtgcataataagatagcaagccaaagataaagccaggattagaagtactttcttaaattgagagcttatcagaaggtaaagctggctaacatgattatctatgtaacagcaccagaccttctcacttcgaaattcaagacatctccaaccactcagaaagggtatgggggttgaaaacagccacattatatgcacgacttctataacttaaagatagccaagttcatatcaaactaagttattgaattttatatcactttctaacaagtaatcatagaaccatgacaaaacatacaaaatacagaagttttctccttgacttggtgcaaattcaatccaattactccacagacctcttttattttagtcactcaaactttgatttttcatttccttagtcgtacattaggacaaatgcaaattatatacagaaggcagcacatttagccttattatctcaaactcattcctaagcaagtacatctgcctggatggtgaggcctccatcagaggttaaatgcaagccctagctgggaaagttactggaagggcatgtgtcctacctgcctttctctctcatcatcccagatctttatctccccaatgtcaccacattaggagtgttttgcatataaatcaaaacgaagccccagagagcccttggtaggaatatctggacttgtgttttagaaatagttttgtcagccaggcacggtggctcacacctgtaatcccagcacgctgggtggccgaggcaggcggatcacgaggtcagaagttcgagaccagcctgaacaacacagtgaaaccctgcctctactaaaaatacaaaaattagccaggcatcgtggtgcacacctgtaatccagctactcaggaggctgaggcaggagaatcgcttgaacccaggaggcagaggttgcagtaagccaagatcacaccattgcactccagcctgggcaacagagtgagactctgtctcaaaaaagaaaaaagaaaagaaaagaaaagaaaagaaagaaaagaaagaaagaaagaaagaaagaaagaaagaaaagaaaagaaagaaaagaaatagttttgtcacatacacatctgtgatcctctcactctgcacgccactgcctctctgaaagaaccaacataccacacaggcacgcacacgatggacaatatacagccaccgagcaatcatatacatcttttaaaaagaaacaggcaatttcatgattctactgtaccctggatccatcaggctttatctagggagtgctatttttaaaatatgtacaggcttttttaggtcctcagtaagatcatggaagtgttttgctccctaaggaaaactgaaatttgaggtataagactggagttttacacctctagaattcatctttggtaaccatgcccatttgatttataaataatctaaaaatatggatttttaaggagcagtgtatttaccttagtccacctcatctttttcttttcaggaatgttatcacaaaaatgtgtgctgattacttccttgtatctgagctttgagcaacttacaaggcagacactggacctaaaacacaggttggttgttttagaagaagaaaaaaaaaaagctggttttaaatctggatttaagtcttggccctgactccaaagcaggccagtttatgtgcctgtcttctgttgccagatctgtagaaactagaatgtcattctccgctgagaaaccacaaactagtttccttagaccattcgtcttcctttttgagacagtctcaatgtcacccaggctggagtgcagtggcgcgatctctgctcactgcacctatgcctcctgggttcaagagatccatctctgctcactgcacctatgcctcctgggttcaagagatcctcccgcctccacctccgcctcctgagtagctgggactacaggcatgcgccaccacacccagctaatttttcctattttcagtagagacagcatttggccatgttgcccaggctaacatcaagtgatccgcccacctcggcctcccaaagtgctggggttacaggcatgagccactgcgcctggccctccttaaaccattagttttcaaaccgtatttgaagttcctcagaggtgcgccagtatttgagagaaggttaaggtttcaatgagagcaaatgagattttaaaatcttttctataaacgggggttctatcccatctaaattttgcttttttatgaaaagggttactgccctttttttaaacctaagtaaaaacccataccctttactttgttacaggtgtgttataatttcaagttgtcttttaagtatgagataactttcattgttacaaaacaagtgggttgggagtggatcaacgagacggaggtttgctccttcatttaacaaagaaacaagaccagagagctctttcctcactgggagttagaaatgaccacagacgctaagaacagaaagcaagacaccaaaactaagaaaggttttaggagctacaatctctcatttagaaactccagatagaattttaaagaaaaaagtaaaaacaatatatttctacaattcaaataatataagtcagagtaaaaaacaaacaaacaaacctacttagcacaacataaaaatattctggttactcatcctagagatttaaaaaaaaatcaggaggtgaggcaggtcctatttttgttccttcatttagtggatctgagtcatggctgttccaatgattttcctgatgaaacaaaatacatgtttgttccatcaacaaagggctaccctaggaaactcatcttctactgcagtaagaagggtatcataggtattttttgtggttctaatgggtactcagaaaatccttatgtgatttaatatactcttaaaaggaccgtctgaaaccaaaacatgtactaatatccagtggcctttctctctgtatactggtttaataataacattctgcatcaaatcctttcagaaacctatgaacagaagtaaaatgatatgatacctgagaattattttaaaatgcttcagaaaagaaaatggggcagggggaggtgctgaaacaagaacagcaaaatgtggtcaatttttgaagctggatgatgtatatgtctgaaatttaacataataagttttaaaatcttcttagagagttggcagatcatatactatacacaaatattgtacatgttataggatcaaaatatgggattaaactaagggactgaaactacttatagaatgtcattctcaagccaggcacagtggctgatgcctataatcccagcactttgggagatttcttgagcccaggagttcaacactagcctggccaacacagcgaaactctgtctctacaaaaaaaaaaaaaaaaattagccaggcatggtgttcctctcctgtagtcctagctacttaggaggctgaggcgggaggatcgcttgagacaaggaggttaaggctacagtaagccatgatgactccatggcactccatcctgggtgacagagagatagcctgtctcagaaaacaaaacaaaacaaaacaaaacaaaacaaaacaaaatcctcctgcaaatattctgttggtggatagttttcaatgtatacaatacagtcagtacctgttactcaatatttatccattgcaaacacaacacagaaacctaaggaactcaaaaagcaaactgacatttgtcaggaactgctcccttgttggtcaaagaagaggaaaaggagggctttcttcgatattattgtctactttcttggtaagcaataaagtgtttgcagttttatgtagactggcggggtggggcggggaattgtgacacggttacactttcgtatatatcaagttactcccatacatgattttaggtagagtctgtattttaatgtggtagaaaggggtgattagtatcttgaactgcagaggctacaaaaaacaatgatgcaacattacgtaagggatgagaaataagtaaataagtaaaaaaaaataagtaaattgaaaagtttgttaatgcacaaaaccaagtaactggagagaaaaggacagaagagtcaaagaatcaaggtccccagacctagagtgagaatgtacattatcgtgtgcataccttaatctcaaatataagctcattatcaaataattgtgcaaaaaaatcatctgttaccttgtgaaggatagaaagggttatttcttccaaagctcaaaatgtggtccacagataaggtaaggttacattagtggttctccaattttaacttgcaccagactctactcaaggttttgttaaatagatctctgggcccactcccagaaaacggtttgagaactatgtgtttatactatggctaattcttgcaaatcatctgattttgaaaccagtcacaattttttgaaacattctatgagaaacatcttattaataagaattttcaacagggctcagtggctcacgcctgtatcccagcactttaggaggccgaggcaggcagatcacgaggtcaagagatcaagaccatcctggccaacatgatgaaacctcgtctctattaaaaatacagaaattagctggacgtggtggcacacacctgtagtcccagctactcaggaggctgagggaggagaattgcttgaaggatgcagtgagccaatatcgggccactgcactccagcctggcaacagagcgagactccgtctcaaaacaaacaaacaaacaaacaaacaaacaaacaaacaaacaattttctggcaaagtaagagtattttacaaagagaacaatcacactggtagagaactgcactgcatggatggccaaattaaatcattacaccaaataatttgcaaacttcatccctactttggtcacaataagtaacattgtacttttgaaagatattactgtctgagaacagagtttcatcttacccaaatacagactaaaaacaatgccaacttcacagtactcacttacatagttgataaacagaaccaacaagtcctctaattggtccatttgaatctggggaagagctggctccaatcattgtcaattacatcagcaactgtggaatactccctgagatcaacaaactgttaactgcagtgaccacaacttgacccaggccagagcttccatcctcgggagggtgagtcaacagcatgtcaacactaacccaacttctaccacgcacagcaaggctgtgctatttaggcgtggatcacacgcacactgcgccaacttctaagctaacaatggacaaccaaagcctccggaactctgtcttgggtagagtaaatcaatttccttttgtaggattttcttggcacaaagccaagtgtcaggggctgtggagaaggaactgctggcccaaattccatccaaggttgaccagtggtttaatcccttctctaaatcaggcctctggcaaaacagctagaatcaggaagccaattcatatttaacaaattcaaagtctatcacaacacaggaacttgttaggcaagaagataactgaatgaacacctttaaaaattctgcttttttaacaaaagctgtctacattattttctcatgggagttttggtactagtgttaattcatagactctcccttaaactcaaataaattatctattgaaagaatggcaagaagtactgccaaacttcatagggtggttgggctaaatgttctcaagttcttttccaacgttaaaacaaccggattataagaaacaattcatttaatggagcattctggaggagtaaagacagaggatttggaatgagactgcataggtttaaattctaacactaactgtaattctggccaaaaggttatgatgtggggtcctcatctgtaaaatggagtatctatctcatggagtcagtgtgagaattaaataagcacataaatttctcaacatgacgcctggcacctagtcaacactcaaaatagaggaaggctaataatgatgacatgcaaatctgatattgcaaataccaacgcaaagagtctaatgaaaactttctaaattatatgtcattggttcattatttaagcttctgaggtttgtacaagcacagattaactcaaatgttacttaacgttttacatttactataaacaccctgatgatgtattttacagtttcttgatttttccctacagtttgggcacagtcttattatgacagaaaagaaagcaacaaacccaaaggaaaggcttttccctagactgcttttaattttctattaactgcccaattttgaaaaatagatctacaaaactgggttctggatgactgagttcttttactttggggacaagagctgatgctaaaggagaagacagaggattaagaaatttacattctgtcatttacaaacatgggtatgaacatgaacagagcctctgaaaacatctggcaaatagaagacactatgagccaatcaatcaccaatgctggcttagtagtcatattaataaatacttgctgagtatatactatgttctctgggctgtattatttcttttacgcctcacaacaaccctaagtttggtacttttctatcggttccagtttacaaatgaagaaacagggaagagtaaggggagttttcaaaaagaaataatatcaacagttattacatcaagggtttcacaaatgaagcattcaaaaattcagaaaggcaatgaattgctttgctagacctgtggaaggccctcaacctgcacaggtagccaacacccggtacatacccaattacatccagttaggtcacctctgtatggctgcaaggagccagggccatgtgtggtgcctagccacactatatacataacctgggaaccatgcagcaagatggaagaataggaaacagtatccagaatccagatgttagatctcaggggtagggtatgcacaaggagtatttgcaccatttaaggtgataacgctgctgtctcatggcaacatgcggggcagtataagaggcttggtaaatatccactggaccttccctaagcttagcacaatgcgtcctggatggagaaaatatcaaagccaccaatctgagcatgttgtggaaccagagagacttaagaggctgcaccaccacacagccctcactcgatctttctaggctctgctaagaatgttgctgctggctcactgcagaaactaacacttactcaaagatggtgcatcctgtgcttattttcaccaagcctcatatccccttctctgccagaccattttaataccattagatacttccctattcaaaattaagacagtgtcactggggccaggcacggtggttgatgtctataattccagcactttgggagatagaggtcggaggctcgcctgaggccaggagttcaagaccagtctgggcaacacagcaagaccccatctctacaaaaaatctttaaaactgctgggcctggtggtgcaaacctgtagtcccagctactcaggaggctgaggtggcagcatcgcttgagcccaggaagccgaggctgcagtgagctaagaccacaccactgcactctagccttggcagcagactgagatcctgtctcaaaaaaaaagtaaagaaaaagtgaaaaaaaacaaaaatagtgtcactcagcatcacttaagaaaattaataaaaataggtactacctgtatttcagagataagtaaaacttatgttgaaatggtcaatgctagatttttataaaaagatgtccaatttttaaaaactcattcaagttataagaaattttataatctttattccatgtcaaagataggcattagaaaaattcagtattactttactttccataattgtcaacttttataaacaatgtggtggagtgggaattaaaatctgataatagttttgatccataaaatgagtgggaaaatcaattttaaggcagaaaaaaatgcttcaagttaaacacttactattaaatatttaaacaaaaaaatgtaataaagataccttcaaaactggctgggtgtgatggctcatgcctataatcctaatatgtcgggaggccaaggcaggaggatcacttagcctaggagtttgagaccagcctaagtaacatagcaagacccagtcttaaaaaataataatgatgatgaagttttgataatcaaaagttattatcccttttggctttaccatagagctacagataggtgtcctggttaggtcacttcttttattcttccctagctttactgaagtataattgacaaaaattatgtatattcaatgtatacaacgtgatgttttgatatatgtatacactgtgaaatgattatcacaatcaagctaattaacatatccatcacctcagagttactttttttgttctgtgtggtaagaatatttaacatttactctcgcagacgttttcaagtgtacaattcactattattaactagtcactaggctgtacattaggtattaatctcataactgcaagtttgcaccctttgaccaacatcgcctcacttcccccacatccaaaccctggtaacaccacccttctactcttgtttccatgagtttgagtgttttaggttccacatataaatgaaatcatgcagtatttgtttttctgtgtctggcttatttcacttagcttaaggccataagtaccaggggcctggatttcaacctcacccctattgtttattgctacttgggtcaaattatgtagcctccctgtattaatctgatctcacgctgctaatgaagacatatccaagactcagtaatttataaaagaaacaggttgaactgactcacagttcagcatggctggggaggcctcaggaaccttacaattagggtagacggggaggcaaacacgtccttcttcacatggtggcaggaagaagaagtgccaagcaaaaggggggaaaagtcccttataaagtgatcagttctcgtgagaactaactcactattaccagaacaggatgggggaaaccgcctctatgattcagttatctccacctggtccctcccactacacatggggattatggggactacaattcaagatgagatccaggtggggatggagccaaaccacatcactcactgaacctcattttgtttatacttcattttgagatagtatttgctctgcctttctgataaagctatgcagaataccaagttagtacctggtttcatatatggtttataatacattattcctgatacaatctcaatttactgtttttatacagcctattactgcacaaacattttatatcttaagcaatgtggattttattataatctcctacactaaatagttataaaaacattagctattggtttgggaaaggctacactcaatcttaaatttaaaagtcagttacaattttccattaaaaaaatacaaaataagctacagatgtcttatcatggtcaattctcttgaacaactttctgggttaaaatgcagaaaatataacagatctcagtatacaattcagtgggagaaagaacagttccactaaactgctttcttctgacttaccatgagaattccaaagatagcattaatgtcaacttgaaaaatgatattacaagcaccaatgctagaaattttagatcgagggagttgctccttgatgttcaatgtgctgaacaaagtaaagcaaatgggcctgaagtaataatttatgcttccagtactttcaaaagcaagttttgatataagaatcagttacccatgaaaatagatgaaattcactgaaatgacctagttttataatacaataaaacgttcttttcaactttataaaagtaatgttcctctgaagaacagctgggaggattctagatatcacatcaaaatacgtgccttcctaacattagagatgttttacgtggaatgggatggcttgcctgtgggatgaagtctctggggagaactatcaaaagctggctgactacctaccaggaatggcagaaccaaggagtcctacattcaagatgtgccaagagggagcagcctctaaggcagtgatctctaacctttttggcaccagggactggttttgtggaagaccatttatccatggggtgttgggggtgggatggcatgagactggatgggatgggatggttttgggatgaaactcttccacctcagatcatcagacattagttagattctcacaaggactggaccaggcaacctggatccctcccatgtttagttcacaataggttttgtgctcctgtgagaatctactgccaggaagcagcactcaggcagtaatgctcactggctcacctgcctgccactcacctcctgctgtgtggcccggttcctagcaggccatggaccagtacctgtccatggctgggtgttggggacccctgctctaaagtatctgcgtacagttaaaaagactcaaatagtacaaaaggtgataatatacaaagtaaatatgtactaccttctcctccattccaatgttctcattgcccagagtcagattttgtcagattcacttgaatctgctactgacataatacacatataaattttctgttttttatataaattactgtttaatctgtgattatgcctgcattctgaatgttttcacttatatcggtatgattttagatatttctatacatcagtatggttatgcccacttttaatgtatcagcataatattctactgtataagagttttttaaaggcttgcttagttgatacaaataatgctctcataatatcctcatctgtgcgcatttatacaatatactatgaactaattagtttctagaattcctagatcaagggatatgtacataaaattctaaatgactgatctaaaaaatttctgtaccagctgcatgcagcggctcatgcctgcagtgggcagatcacttgaggtcaggaattcgagaccagcctggccaacatggtgaaaccctgcttctactaaaaatacaaaaaatgagccaggcgtggtggctcacacctgtaatcccaggtactcgggaggctgaggcaggagaatcacttgaacctgggaggcagaggttgcagtgagtccagactgtgccactgtactccaagcaaagaaatatctgttatcaattgacagtagatgaaaatgccaatctggcaagcctttttagtctttgcccatcagggttttaaaaaacaatgttatatcactgttttactttgcatttccctgacgactatgagattgagcatatcttcataggtttattggctgtgtattttttcctgtgtactataaaattctttgccttttttgtccacgtctaatagagattctgttagacatccacactgaaatatttatacataaaattatagaattgaaattatttcaaaataacccagtgagggaaaagagaattgagcaggttgagaaaggggaatacagataaaacaagactgggtgagagctgatcattgctgagcattcagcgcactattctctcttgtgtatgtttaattcttttcataataagttttcaaaaatgttcatttttctctgaagatgttcatatttagtatttcttactgatttgtaagaacacttcatggaataaaaaagtttgccttttgttgctgacaaactgtactgggtacataatactaggtaatccagtattggtactgggtaaataattacccaccttccttctatgtacagtcagataacccaacaccattaactaaataatccatctttcccctttctgatgtaaaaagacacttttatcttgcactaatttccaatatatgcacaactttatttctagacttccagtttgccccattgacctatctatgcatgggatgtgcagttttaatttctatatctttacattttgcttctggttttttattggctattcttacctaatggtttttcccagatgacttttataataattgtattaattttcctaagtatctactacacttataaacacccctccctgcagaactccttcccaaagacagagagcctgcttttctctttcacactggtatgtttttatgtttccacctagggtctcatctgttgcatgcaagctcagaattcacttgacatgctgatagcatataatgttaaagaattcttctctcagtgtaaaaaatatttagctactgtggaaggtcaaactgctaaaaccgactggtgtaacatttgaatgctgccctttatataagctttatttttataaataagcatctgactagaaagtcagtaaaagagcatgatataatcagtctgaagcccagtgttttaaatataatacactaattttagacccaagtattttagttttgctttattgtctacagtttcttaagaagatgtaacttaaaagaaaaaaaaaatcttttaaatggctcaatcaatttattagaaataagcggcaaagagcatctgttcccacagagcaactgttaagttaatccccattaagtcggcctcaaagcacttggatgcagctacaggatgtgggtgtgataggatcacacaggcgaacacctgatagggccttacacacaccgggctaatcagaacatcaaaaaaaaaacctgaagtctcttggaaggactgaaaaatccaatccctccccaacccccccaaaaaaacctcccaaaacagactattccattcaattcagattttgtgaattaatgaaatttaagagccacctgaaaccaccaaagatacacagtgattttctcccgaatctaaggtccaaatgacacaggtagaaaaatgcactgataaaatgttaacaaaaatgcatgtctaatacttagagctacgtgtgagcaggttttaggagaaggatattgattctccctgaggcatgagcattacccaccatttcaggaagcctctgcaagtggagaagccacaaaccccttcaaaaagatctctcaattacccacttcccagtcccctctgatatgtggtaaacaattatttcaatgaggttggcagagatttttcaaagctagcaggcaggcattttgcagctacctccagctggtccaagcagccaaggctgtcaccagtgcctggtcaccgctgaaaacacaaggaggggcaggactagggcaggagagtagatggagagagctgtgtcccgaaccaacattcttgagattcctttgctagtgttttttcttcagggttcactgagaagaggaaggtcagatggggagggacaaaacccaaggaaatgaggctcatttcaaactctaacaacttgatcacaaacaaaatgtatgtagaattacaaataagttattctgttttcaggcatcaaaaatgttatcaatgaaatgttgagatgctaaagcagtgaaatgtgaaacgaagcagtgtcacaggcaactgggcctctcccctggcccatcccaggagggatgaagggtggctgatatgaactctaaggattattctgaaggggccaacaaatgttacaaagaggctcaaaaataaaaatcagaaccatttttccctcattcatccagggcctactcctggccatgttctgtgctttgcactttattcaatttaattcaatttttctcctaagcaatctatttagatactttgtagatgtggaaattggtttagggaagcttacatcattttcttgcagtcatatttctagtaaattgaaagagttgtgactcagatccaaggtctgaatgactccaacatccacactcagaacttccttcacttgggattgagaaaaagggaaataatggaattgggagggggagagaagacaccaagtagagatatcagcattcagaacttcctgcaggagagggtgaaagaagctggcagccaggaactgagggccttactgattactttagtatcttaccaatcaattgcattccaaggcttgcttacttaggaggctgactgcttagtccaagaagaaacactggctgaactctttgacttattttgctggaggcagagaagataagtggttaagagtaaagacaatgaaaacatagtttaaacccagtccactggccagctccctcccagctggggataacagtaggtacctcacaggctgctgaaaagaaaaaattaagtgaaagcacttttcaacaaggcctggttcatagaatgagctacatacagtacctggtaattagtattactattgccacaaccaaggaggcctctcagcaaactatttttacatatgccagaaatacagttattttttccagactaataaatcacaaacaatatggcacggttgaccgccaggttactgatgcaatttcttttcactggaaccaaaaaacaaaaccaccaccaaatctgaactaagtataatacaataattctccctgtcttaaattttaaaatacagaagaaaagatgaattgctgtatactctaaacgctcttttaaatgtttggagtacagaatgtctttcatgaaatcatcttgattaaaatgtacattcttttccaagaagggagtaaactgagtatggaagaccctcaccattagtttttataaatgattgatcaatgggaatcgtcactgaaaaattgcatacaatttttggaatgaatgcaaattgatggaatgtttgtaagctcatgtgcttcttccaacaccccagcatgctcccacctcacagcctttacactgtattgttctctccaggtttaatacttgtagaaaaggggaaaaaaaccttttttctctaccctgttaggttcagcacatgaggccttgccaattaaactgacgagacagattcgcaggggaaaaaacacaaattttatttaatgttattatttttacatgagggaggggagaggagggagctccacagaaaagcaaaaacccaaaagaagcagttaggcctgagagcatacacaccattttaacaaagagcaataaactgtggagaagtcacaagacaaaggagaggggattagggcttccaggggaagtgtggtaaggtaaatatatgggggaaactaatagaagataagggttatttcaataaggtttgtttctgcaggcgatggtgccacctctagtggtctctccagggatggagaggggaaggaggataccttcacacagcaaaatttttataaaaagggggtaaagcttgtcctgggtctgctatttctcgattgtcttcagctcaaattagtactttgctgaaatggcatatttgggggtagcatattctgatccccttcatacccttccagactgtgtctctatccagctcctcactggcttaatttttcttcatagcactgaccaccaagtggcacagagtatactgattgacatctagatagacagatagatagacagatagatagacagacagacagacagattgactgatttgctctctgccccacccaacaaagtacaagctctgtgagatcaggaagctggcctctttcatggttgtatcccaatgcttggcatagtgttggtgttcaattaatgcaccaaataaatgaacggatttccatattatatcaatattttcttacaattagaatttctgtgatgttgatagtgtaagaatttgtttttattagttttcaacagtatcaacatttactcattatgtagttacagtattgtatttttttaaagtaaacaataaacaacactgtctttgctccaaatacctataatgtgaaatatataaaactggccgactgaccacagaaacggcagttaataatcaaaattacatgtgtctggctgaatggactccacgaccttacactaggttctgtaacagcagcatttcatcacaatttgttaaatttgaagataaataccgtctcttttctggtcaaagattcttatatctttggaaacttgacagaattaatgtttttgacttgtttttcaccacataacatcaggagagactttaacagcagtgaagtggcaaggaggacgctttatttatatccgtgtaatcatgtaacccacttcatgctcccactgaatggctccagtaaactgaaatcacaatttcactaatatctacattccagctccagctacatttgcctgtcaaatgcaacaacttacagttaagcttctgcctacacgagcaatcacagaaccattaaataagaggattgcttgtttgaactactagatcagcctttccttatttttgctaatctgtgtggtgtacgttcattaccttttttttttatgttaaagaccaccatgcgtaacactacttgacagcagcaatttatagcagtggtccccagcctttctggcaccagggaatggtttgatgaaagacaattttgtggtttggtttcgggatgaaactgctccacctcagatcatcaggcattagattctaataaggagtgtgcaacgcagctctcactttcttacatgcggttcacaatagggtttgcgctcctatgagcatctaatgccctgctgatgtgacaagaggcagggctcaggcagcaacactcactcacccattgctcacctactgctgtgcagcaaagctcctaacacgccacagaccggtaccagtccatggcccaggggttagggactcctgattcacagcattacaataaataataaataattaaaatattacctgatatttggcaaacaatccctctctaagtcactacttccagcctatgttcaggctagaaatgccaaataaaaaagcacatgtctgtctgggcacggtggctcacgcctgtaatcccagcactttgggaggccgaggcggggggatcacgaggtcaggagatcaagaccatcctggccaacatggtgaaaccctatctctactaaaaatacaaaacaaaaacaaaattagccgggcgtggtggcgggcgcccgtagtcccagctactcgggaggctgaggcgggagaatggcgtgaacccgggaggcggagcttgcagtgagccgagatcgcgccactgcactccagtctgggcgacagagcaagactccatctcaaaaaaaaaaaaaaaaaaaaaaatgggccaaggatctgaatagacatttctaaaaagcaaatgtacaaacaaacaaaacaaaacaaaacaaaagcacaagtccacaactacatagctccagtttccctaaacagatttacccattcagtaaacattacatgtacaaagaacttaaaatagtatgagatttaatgttaagaaataaaatgtaggatctaaaacgtaatctatagcataatctcaaaaatggtttagaaatgacataataatacagacatttgtgggtggtaggattatgcatatttttatatatttttaaatatatttttcaaaagcttcctataaagaatgtaattctttcccaattccaaatctagcttaaacataattttacaaaaattattctctcagaatgtaaactagtaccacctctatggaaaacattatggagatttcctaaagagttaaaagtagatctaccatttgatccagcaatcttaatactgggtatctacccggaggaaaagaagtcattgtatgaaaaagacacttgtacacatatgtttacaggaccacaattcacaaatgcaaagatgcagaaccaacctaagtggccactgactaatgagaggataaagaagatgtggcatatatatatcagggactactactcagccattacaaggaacaaaataatgtcttttgcaacaacttggatagagctggaggccattattctaagtaaagtaattcaggaattggaaaaccaaaaaccgtatgttctctcttataagtgggaactaagttaggaataagcaaaggcacacagagggacatattggactttagagactcacgaggaggagggtaataggggactagggattaaaagaaaaactagacattaggtacaaggtaccctacttaagtgcactaaaatctcagaattcaccactacgtaattcaactaagtaacaagaaaccacttgtaccccaaaagctactgaaataaaaattattctctcaaaaattttaagccctaaacttcagttcctattgtttatatttactaagaaaaacaacagaaaacactgttttaaaaatggtggatttttttaaggttaaaggtatataagacagctgcctaaggaaacgcagatacccctgtaccttgttgttgttgttgtttttcacttttttaaaaaacatagagatgggatctccttatgctgcccaggcttgtctcaaactcctgagctcaagcaatcctctgacctcagactctcaaagttttgggactacaggcgacagtcaccatgccagccaatatccttgtacttttaactcattcctacaagccatgaatcctctaagcattgtcccagacacagcactggcaaacttcaatcgttttcatcagaatataaagaaacacagggcatgcttaacttcaaggttgatatttcctttgtgagtaaagccttgccacagatgagaagtcctgaggatcaaacaggaaaactttaagtttaattaaatctaaaatcataaaacctaagttatatgactaagcaaactcttcaaagcactcagtcaacatccatgctggtaaatatttcaggaatgaaatgaaaaataactttcaattctaaaagttcatccatcatgcatgcttcacgttgtaaagcaaatatttcacaaaaatgagtttacaacaaaagaacaccaatcccacttctccaaccctccatgtcaggcagtaagctttccacatttgcttacattctgaaaataactattttacatgccaggaatgcaataggcttaagctgtcaaaaagtatcatactttaagtgtaactgggtaagaactatgggcacacacacaataagccttccaaaacaaggggaggtaaatgaaatcttaatacctgtgtttccagaagcccagaaatgaagtgcaattccttataatctgtacatgtttacatacccatacagacaataaaatgtgtaaggtaatgacaggtccatctctccccttccttttagtgggcatctgacatttcagggttcagaatcacatatcctgggtcccaaaaggtccccccattcctattccaacagtgctcacaatagaaaaagatgaactgatcactggaccctacatcatctcatatatgtataatactagtccacagagaggttgaagatatgcctggtaactctattcatcctaccccacaagttttgtccaaatcaggccatgccttcaagtgggccagattgtcttaaagctcctggcttaatatttaactgatagcaacaacctaacgttagtaccttagtaactaaaggggatgcagcaacatgaagcagaaaaagtgatgaagaaagagattagaagttagagaacagggactgggctcttgatccttaaaatgtgggtgattttgaacaactcaacatctccagatattactttcttcatctgtaaagtggagaagcttaaaaaggaggtcttatagattctacctgttccagaaactatgattctcttcctagacagctgcaggttgaagagactctcctagagctgcactgtccaatacagtaaccactagccatctgtggctactaagtacttgacatgcagctggtctgaattaaaatatgtgaaatatgtaatcaggtgcggtggctcacaactgtaatcccggcactttgggaggccaaagcggcaagtcacttgaggtcaggagttcaagaccagcctggccaacatggtgaaatctcatccctaccaaaaataaaaaaattagctgggtgtgatggcacacgcctgtaatcccagctactcaggaggctgaggcaggaaaactgcttgaacccaggaggtggaggttgcaatgagccaagattgcaatgagcaagctagattgcactctagcctgggcaaccgactgagtgagactccgtctcaaaaaaatagtaataataaaataaaaaataaatatgtgaaatgtgaacattttgaagacataatatgaaaaaataatgtatttcataaatagcttttatattgaccccctgttgaaataacattttgaatttagtgacagactaaaattaatttcgcctgcttatttttttatgtggctacttgaaaactttaaattagatctaacggtcctattatacctctactggataattctgctttaaagtcagtcctgggcatgcatgacgcccagaggaattcacagataaaatgagcccaggaatctgtatggaatacagacctgtaggttaccatttccatattaaatgtgtaaagggctgttttaaaaccatgcttttgttttcttattttgtgcaccaacaataaatcaacagcaaatatcattgggtctaaaaataattgatatctggctgggcgcggtggctcatgcctgtaatcccagcactttgggaggccgagacgggtggatcatgaggtcaggagatcaagaccatcctggctaacatggtgaaaccctgtctctaccaaaaatacaaaaaaacgtagctgggagtggtggcggaagcctgtagtcccagctactcgggaggctgagggaggagaatggcgtgaacccaggagggaggcagagcttgcagtgagccgagaccgtgccactgcactccagcctggacaacagagcgagacttcgtctcaaaaaaaaaaaaaaaaaaaaagataccacttcatttatgctatgcctgaatcctaattatcaactgtaggccttaacaataatcctaagtggatgtgcctttatgcaggcacttgtggcctttttgttttctttgaattaaatatacaaagtaataatttatcttacttcataaaaagattataatctcccattttttaaaacacatttgatattagtaggaataactaaaatgaactcgtatgaatagaccatttttatttcattgatatctaactaggaacgttgcaactaatttttgcaatctgtatcaatttgtttaatatattttaaatgaacaaagaagcagagatagtttctagagagcttatttacttaaaaatacaacagatattaatcaataaaatattaataagattcaggtgagtcgagagtgagtactcaagttctcttttctcacaacgtattcttggagtgccaaccttttcagttcaatgattttatgcaaaggtatacatctaactgcctgcaaaataaactactgactattttaaatcagataaagcaaacaacagcccccagctctgcaatccaaagccagcaaaggtcacccatttcagactgggtttgaagcatagccagttatgatagctcaaatattttcagatgtatgaaagcagaacagaattcagaaatatacattctttggcagacaatttttttagaaccaagtttctcaaattatataatacaaactatatgactattagaaaattatgcatgaattaaaggagatttatttaattttcaaattctaatataattaaaattttcaaacttaactatatgggcttcacgggtgaaaaaaagtataatttaaaaatatgagcaatataatatgacagaaatatacattcaaacactctttctaatttttcataaattaacaactatttgagacatgcacaaattttcatgtgtttttctgaaggtggtatccagaagtgataattttcctgacagtttaacattttttaaagacatgccaagatttaaataatgtagctttttgattactctttttttttgagacagagtctggctctgttgcccaggctggaatgcagtggtatgatctcggctcactgcaacctccgcctcctgggttcaagggattctcctgtctcagcctcccgagtaactgagactacaggcatgcaccaccacgctcggctgatttttgtattttttgtagagacggggtttcaccatgttggccaggctggccttgaactcctgacctcaagtgatccacccacctcagtctcccgaagtgctgggattacaggtgtgagccaccgtgcccggcctttttgattactcttaaaactgcgggatcaaaatgaaatgttagaaagtaaaaccaacagcagaaagtaaaaccaagagcagcttctgaggaatcatattttagacatttctttcagacagattctgtaatgtgtcaaactattggaacatatttcaactaaatatttaagtgaagacaaaatccctactacaaaacctccaaatactctaacaatgatgattctatcaggcctactcagaactacaggttttccccacatcttgatttcaaagcatactttctgtgacgtatcttcatttaatcacttttagaataattgaacaagaaaataggtaaggaattaaaataaattttaaaatggcagtcccattcttactgacataaatttattaagatcaatgttcctttttgcatagatcttcccattctgtttcaataacaccagcaagcataaacagatttgaaaagctacgcagccacagaaaacaggttcagcatgacagacagatctagctcaaaagaggtgctcagtgtcaagctcttttctaaaaacctcaaagcttgttttgtctgctgttgctttcaaagaacaagcacaacaaaattgttttgaggaagtctctagatcaaacgaaagacagttaaccaacagggagagtaaactgactgccactgctgtccacacagggccacagaaatcattgctttgttccatcactctagctggaaggccttcccaggaatgcaagtctgaaccatctagagttctctcagccagaatgaaggctcagctcttggatgtttctaccataaaaatgagaaagcatttcctacctcctcctctgtcactccacaaagatgtgcttcctgtgtggctggctagcagataagagaaggtaagcaaatcccaaaagcctactctaatcgctcacggagaatcttagctttggttcagaacgttaagtctacccattttcctctatccctttatggtactgtatttcttctacatcccagaatgccagttgccactcaatatcctacctctcctttacccttaagaagagagccggaaatgtaatttctgatagcaatgctcccagctaatagagcacatttacatgctcccttgcatcgaggtgtcactatctggcccatgagattaagcagaccttgaaaaggacttctacaaaagctcctaaacctaactgaaccatgaatatcaatgcctcgtccccattttaggaacatttaaaagtactccatttctaagaaaatgaagttcaaactcattaagggcatccaaaatttataatttcacactgtctccttcacttattatacccctgggcttccccctttgaaactctacaccctcgctgttttttctgtctgggaagccctccccaccccagttcaccttcacacatccttgaaacctagttcaaattctgcctgccttctctgggaagagtttgtacctcctctattatagcctttggcacactgtacctaattatttctccgtctctttcttcctccactggactgcggaattcctcaaggcacagactgagttacctttctatttactcacagccccacccagattctagatctcctgtcataactgaaacacagaatccatgcagtatgtccataaaatgaataataatttcacaaattcaaaatgagagaaacaataagatagtaaattttttttttttttgagacggagtctcgctctgttgcctaggctggagtgcagtggcacgatggctcactgcaagctctgcctcccaggttcacaccattctcctgcctcagcctcccgagtagctgggactacaggtgcctgtcaccacgcccggttaatttgttgtatttttagtggagacagggtttcaccatgttagccaggatggactggatctcctgacctcgtgatccacccgccttggcctcccaaagtgctgggattacaggtgtaagccaccgcaccaggccataaattagtaattttttaaacatctaactccaaataaatgtcaacatcacagaagtcaatcacaaatgccctgagaaaacttgcagtagagacataaaaggggaatgcacaatccaaatattcagctaaacattctgcattaaaccttccccctcatctgcacacagaagaatcacgggcttaggcttggctttgtgttcaacctctgatagaaatgagcaaacgagcaatgaagtcaacatgtcagattgctttgtaaatctaaataacttcgcatgtgataataaattctaagaatgcatccaatgtctttttctctgcaacaacaagacactaatatttttttctcatctcatcggctatttattaaatcaataaatacaattaaaaacacatgcgcataagaaatactctcaataaactgaagggatgcttcccatctgtgtccctacaatatgacccagaaaattcacaatgatataaatttaacctttgagtctagctcacaaaagtgaagtgaaatatccaaatagcaaatacgaagaaaggaactaccaagaaacaaggaaagtcagcctccaattttgttcatttaagtataccctctctgccaccacaacattcattatgtttgtcctggacagctctaatggccatgctgattgatactcagtgttaaggccacctctgtccaacagacagaggtggcttctactctgtttcagccaaatactcacatggctactctatcatcacctggaaatctcccagcttccctcaggaattcccccctctcctatttcactgaacaagcaggaataagtgattccaaaattgcaattttgtctcaaatgtactcttaaaagtgaaaccctccacaattcaactagcagcagttctgtaagctgcctttacattcaaacaccctatgggttagccaagaacgcccctccacaacaaccatagaatttttatattcgttttacttctgttgcatttaaattttctggattctgtggtataagaggatttaacacttgacacaaaacattcaaaataagattgagaaaatactagcaagatacaaggctaatcataatgacctcaattagattttcaattcctgtcaagttaatggtatatagtagtattggcttcaagctcttcaaattgaaaaatacaattcttttagataacagaggtaatagaattcaatatatttttttaaagggccaattttgatccttgtcacactaaacactagctgtaaaatggccaaaaaaggagccaaaaaaaaagacaatgacagagaaattttcattttcatgccactaaatttaattccaatacacattttctttccaaactctactaacttcttcacacaaaattatgtctaggcaccctctattgaaagtgtcccaatcaatcagggcatggatgaaatatttcaaaaatgaggcattttttctttttgcaggccaactgaatttttgaaatacaattgcaaatgactgaacgtgatgtattgacagtatttatgaaaccttttcacaataaaatgttccaaaaagaggctgaaaaaaaagaatcttatttaaaaggctttaatcttctttctatgcttgttcgcagtttcttaaatgttgagaaggttgcacagctgttcgaatcttcaatctgaacgtaattctttatcaccacaacatagaatttctagagaactcatttatttagtacatacaaaatgtaaggcattatcatgagtgatcaaacaaattactgtatagaaaagtgtgtgatcacaatcaacactaacttctctctcccaccacttgttttcaacatttaatcacccaaagtagatcttctgtctacaattattcttttacaatgtagtaaatatatagttccttcccccagttatctaagtttaccttcacatactgaaatgatcagagaactttgacaatactacagaaactattgcattcacaacacacatccttctacgtagcattctcttatattccttacccaacttaattttttccaagtcacttccttcctcctttttattctgtctaccctcttgggggcaaggacctcgaaaatatttgtgaaatgaaggagtggccctttcttggttgtacccctaagaatctaggtttctttgtgtatgaaaataagctaatttccacagaaatttggctttaattttaaattgctaatcaatttaatatgtaagtatctatgattaattattcttagaataattagtctgcatattttcacatttctatgggagtttcttaggtactcttcagttatatcctcaaactaatttactgtaatgacaaaattatatttgtgttaaaccataataagcaattgagagcatcaggatggagaatatttgctactacatatcacttttcatatgatgggttttaatgttagtctctgaagacttaagctaagacttcaaaaactttgcatcggttttaaaggcttaatctttgaagtagatgaggattttttttttgaaagataaaaaaatcaataaatacagttaagaaacagtgcttatccatctttattctatgagcctatcaattcaattataaacaaaataactgagtaatgatatttataaaaacaacattggccaggcacaatagctcacacctgtaatctagcactttggaaggtcgaggcaggaggatcgcttgagcccaggagttcaagatcagcctgggcaacatagtggggaccccatctctacaaaacatttaagaaattagtcagatgtggtggcacatgcctgtagtcccagctactctggaggctggggcaggaagatggcttcagcccaggaggccacggctacagatcacaccactgcacttcagcctgggtgacagagtgaggacttgtcccgaaaacaaacaaaaccaaacacagtatcaatatgcttttgaaaattcatccaatagtaggagtagatataacaagtccttttttaagatgaataaacctttaatggataaagccattttctttactttctcttaaaaataaaatttatgttgcctcactaattttactgtgaaataacgagcacacagacaaggaaaaactaaacaaatgagtttgtagtaacttgggatgaggggcaggtctaaaacacgttaagtctatctcaacagtaggattaaacctctcatttttcttcctgtaaaatatctccagggggtcaaaatatattagttattcaatgtttgaaatttagcaaagcagcaagagtaataatgcatttcttcacttaacacaaatgacttttctttatgcaacagatctcttattctcataagtatcttttatggctgaaaagtaatttatcagtctgtatcatctaggatgccttacatttttcaatgaagacagtatgtggctttctggaagctaatgaaagccaaattattaaataagagacaaattattagattctctcaaaaaaagcatcaggcaaaaaaaaaaattcctatcaaaatcaccaaaaaattggccaggtgcagtggctcacacctgttatcccagcactttgggaggcctaggtgggtggatcacttgaagtcaggagttcgagaccaccctggccaatgtagtgaaaccctgtctctactaaaaaaaaaaaaaacaaaaacaaaaattagccaggcgtggtggcacatgcctgtaaacccagctattcaggaggctgaggcatgagaattgcttgaacccgggaggcagaggttgcagtaagccaagacacgccactgcactccagcctgggtgacacagtaaaactcagtctcaaaaaaaaaaaaaaaaaaaaaaaaaaaaatcaccaaaaaacaaaagaagtgacaattattcttgttgaatcaaatttctcataagaaaaccttctgactttgtgaagaaaaaaaggaaccatctggaaattaagagattcaaacactgtttggggtccatcattaataagaccttaaggaatcactgcacttcattcatcaggatccattaatttacaaaacaggcttattcatcttttcccttttccaaaatgtttgtcctatttattcctcatccctgctcatgaaccctccactcctgcttctggaaccatcttaatcactcctcactgtatctactgtaatcaggatgtttatcacaaatatggcttctgtcattacacatcctcgtatgtgaacccacttcttgtcttcttgtctttagttggacaggacaattataattacatgagctggttaacaaaaacccatgtgaattctttgggactctgcttcttgatttttccctgcgttcatcatcatttaaccacagtatcaccagtttcatacactcaaggctttcaaatatccttggcctgcttttgaagctaaaaaccttttatttttgagcaacatatgctgatttttaaaaaaaatatataatttcaattaaacagcagatcactataaagttttaaagatgtaacagccataacatggctggttacacaaattcactttactgcagctgggcgcggtggctcacgcctgtaatcgcagcactttgggaggccgaggcaggcggatcacgaggtcaagagtttgagaccagcctgaccaacatagtgaaaccccgtctctactaaaaatataaaaattagctgggcatagtggcacacgcctgtaatcccagctactcgggaggctgaggcaggagaatcgcttgaacctgagaggcggagattgcagtgagctgagatcgcaccactgcattccagcttgggcgacagggcgagactccgtctcaaaaacaaaacaaaacaaaaaattcattttattttgaaactgatttcctagagaaatgccgcattctcaagcaatctgctttttggtttccctgtccttgggtgaacataacttcaagcttccatattaggaccaaaattcttttgctggcatttgaaatcttccatttctacccagattggcaaagcctgtttattcgttttgctagcaaagattctactgaaaactaaaccaagtctgttcacagttccttgcacatagctgatagccaactaatagttaataatcaagccagtgtataaacttgctcaatattagacatctgtggcaagctgccagtgtgtacaacattaaaaaataggtctctgggaggccgaggtgggcagatcacttgaggtcaggagtttgagaccagcctggccaacatggtgaaaccccatctctacttaaaaaatacaaaaattagctgggcatggtggcgagtgcccatagtcccagctactcaggaggctgaggcaggagaatcgcttgaacccaggaggcggaggttgcagtgagccgagatcgcgccactgcactccagcctgggtgacagagggagattctgtctcaaaaaaaaaaaaaaaaggtctacatccatgttatgtggaaaaaaagaaaaaaaaaaactaggtatttcccatttgtgtaaaaaatgcttatgctttttgcacatttctgtactgttttaaatttttcaatgagcatgaattattttcatttttcaaaaaaccaattgaaatacacaatacatatttaataaatgaaattttataacatgtattctaaaaattgtatctgagataccatgtgctttttaaatttagatcaaactcatagacaacaatctgtcaatttcctgcaatagtcttaattggccaataagtaatttgtcaataagtgaaacatcatctagatttttaactttcaactatgcaggaaacttacatatacccattgtacatcaacatcatcaccatacatagcagcaactaacacacagtgcttatgctatgccatcaggttacatatatattaactcacacactgtttcaagcatttaacaaagatattaattcgatcctcaataactagaagtactcatcccattttacaaaggaaaaaactgaggcacagaaacttgcccatggtcactagctcaaaagaaacaaagacagaatttatgcccatgcattcctgccctggtctaaactctcctgattagtgtgcaatgctgccttctctacatacctgagaaacactcaatgactcagtgttattggcctaacatcacgcctggcatcaaattcaacattataaattgagaacaactctggttcgttctacagaggtgacatttttaaaaacctctcatcttccccattttaactatcttctttcgtaagatactgtgagtctcgcaaggttcaagctaaatctctattgcatgtttcttcaacatgtagccacacaaaataaacctaaataaaatgatctcttaggtttctatttcagcagatttaatacatgtgaacctgagacttctgtggccctctctgaatactcagctagctaatctactaagcatccctgtttcataaagctattaattgatgcacatatccaggcttttaaatttaaatatgtgaatttattcctagagcaatcattgtactccagtttttgccagatttctacttctgaagaggtaccactcaagcataataataatctataaccaagattaatctaaagaggaaaatttgccaaacttttttttccaagaaaaatactagtgtcctcacagtaatgattatttcttaagccatccacactaaactgaaaaaatagttacataacatttccccctttactaagcttttcacttgcaaaatcagcttcagggtttgagttctgtctgcttttcttcttatacaacaataaaaaaagaaatacatattttattgattaaacttgctactcattctggggtgtgctcattccttcccctgccaccttctgtcttctgtgtacagatgagggtgttatctgtacactggctgtgagacccacagggtgacagcgtttccaagggtttgcaaaagacggcatttcccatccatccccactccatacatttgcatctgagctctcactatgaaaaggaaaagatttttttatttctgttttcttcagcccttttctgtctacaaagccaatctcctctgttcaactcatcggaacatttatactattttacagaatagtgttgcctgaatgtagaatcacaacaaagccagttgagatctttaaattaaaaaaagaaaaaaaaaagatttcataatcaagcatagtcaagtgaaacagagagaggttgaaaaccaccagacaaaaacaaaacacaaacagaaaatgtgatttttccctatcctcctcgttgccactgttcatctcatactctgcccatcaagatgctactgaagctctctggtcctgcattcagccccttacctttgacctctcaactccttatttcaaattccctactcctgttgagaataccctgcaccagcatctgtcactcaagtgagagagagagagagagagagagagagagagagaaagagagagaaagagacagagggtgtgtgtgtgtgtgtgtgtgtgtgtctgtctgtctgtctggtagaggcagagaggaatgtaaacaaatattgtatatgcagaaacttaacctccaatccccagacctgggatataaacctggctggaaatttactaccaggaaatgctccaggattatctatgatctcatcccattgttccttactttttaaatacaggaagttttctctgtaacatatttactcagtatacctaatctgtattttccttttggtattttagtacattccactttgttttattatcatgtgcatgttttatttaccctgcaaacttcctgggagtaaggggagggaggagggaaggggaggtaatgaggtatgcagtcgaactaaaccttacattctggaagctttaaatttaaaatgcatctgtacaggtttatctttacatttgtaattgatagagattttaaaagaaatgtattaatgaaagatgctttgtaagattctcaaggtaatacaatttgcagaaacaatgtacatttctactgaatttaatgcacttctcactgatagtttagtggccacgtgaaatgcaagtaatagctatgcttatttccagaatgactgacaacattcatacaaatatctgtagaagactctagtatgcaaaaaacagtaacataaaatagagatcctctagcaacaagacttaacataaagacaacctctcccattccttcaaaccaatattgttgatcacgttatttctttttaatttttttgaatcagccattcctcatttaacctcgtgaacttgcatgttccttttcatttcctcagtcaggaccagtattattccatctagtaacttctccgcagtactaatagccttgcaaatgtcgttcaggagcctctgctggttccggtgacaagagaaaagcttctgcagtctgccagttatcatggtttctcatcgattagcaagaaccgtgactccttacagatcaccatcaaacctgagctttactattctgtgtgtcggcttctacctttagcgaggtactagtcagtagcagcaggtttccataaactataaattagcactaccacaaaggtaagatgattgtgactaggttaaaccctcaacagagggaaataaaacttaagaggaagctagatttaaaaataaataaataaataaatattagggtagtgaaacatcatatagattagggtttgttaaactcacacctctatcaacataccagccaaaatcatcaacccagataataaccatgtttcccccgatagccaaggccccattatcattgcccttattcatttcttttctacagccacctgcagcagacctattttctaagctctataaaagacagtcaactcgtaattacatcttttcagtggacacagagagaaccagataaaccaccctcaaacctcagtagactgaattacctacccttctaccaacacttcgcaaaatggcataatgtgaatctcacctccaccctttaaaggagttaacaatagctactgaaaaggtcccaaaagatggcagaaagagcatattaatgcaattaaacagaccaaaaactaaattcgaatctgcctacatgcttcctctttttatacagaaagaaatattgctcaacaaagttacatatttaagttttgacaaaagcttcaaaaatacggttatcatatgcttttaattccttaaatgtatggtttttaatctgtagtaagaccattcgggaaaactggaataattctacaaataaatgtaagtaagtcatgagagaaatcagaattctcttagttaagtgcatttttttaaaacatggaaaacgaaattctttaactcttaaaacaacctgtcttaactagccctaaggtgattcctgagccacttgtgggtaaaaatcagaagagaaaaaagttcaatgaccttgcaaattagaaactaaaaaactaatggtgtgatagtctgtacagcctcagtggaattacaggaaaacatctgcccggaaattgctttttttcttttggaaaattactaggaggctgggggaaaagaggggaaaaacgggtaaggaaggttgcaaatgttaagatgccaaacaggaacccaaccgaagtccgaagtgaaatacagcctcctctggcccaactgtcatgcaaacaacttctaagcatcttcagatgtaaagaaaaacagtcattgtgcacaggcgttagctgaatgttcgagagttggatgaatggggaagacttgttatacacctagtggtgggtggatttcactaggctgcagcctccacacagcttttctttgctgcactgcagaggcgccatcttctccgtcttaatcttcactcaattcgatccttttatctgcaccctaaaaaaaagacccttcggaccctccccagcatcctgtgcccccaggggaactaaaccagagtccccagagctgccagggaagaggccgcgccttaatcagacaaacgcctccttggatgcacaggacagagcccgtgcctccccaccatccgccactgccctttccagacgcacatcccactctccgccttatttcctccccgccaaggactttacagcccagcacagaattaagcctcggaggtgatccgagggtgggaagcagaggggccccgaggctccgccagaagccccggcagcgtctctgccccctcccaggcggacgcgcagccccgggaagggagccgggcgggagcctcggtggcgcactgagactaacgcggctcggcccacggcgagggcggggtgtcgcggcttttgttcccgcggaccttctgcctctcagacagagcttagggtgcgagcgaactcccgggacgtccagacttggggaaggcgcggggtggctatgggtctccgacccctcccatttctcgcaagttacacaaaagggagacgcggacatgcacaaagtttgcctgtggaaggcggtgcgcgaccccgacgccggctcgggctagggtcgcacccaggctgccgccgccagcagccgcgaaaagaggttggagcaaggaagggggatgggggtgagagaggaaggtgaaacgaggcggagaacgcagggaaaagcgaggggctcctagcttcctgggctgtcccgactcctcctcctcctccccagggcccaagagaaaggaaagggcaacgattcaagagcgaaggactggctttagggacgctgcgttttcggttttccccacgtgctccttcccccttcccccctgtctgaatgtctctcgcctcccccgacccccgcttccaaggcagggactaagtcggggtctgggctcagggtcgccccctacccttctcgccccgggctggcgcggaaccagggagaccagcgcctcgcccgctccctctcagcgggccggagcgcgactccctggggcagggctgggccgaaagcggggatgcgctggacgtccgcaagcgggggcggagaggagaggggtcccattgacggacccccggcttctctgcattaaagacttgggttaaggtcttggggggtatcgcgtccccaccgtgcagcctccccccgccttccgaggcgcggcacccacctccagcgcccgagccgtccaggcggccagcaggagcagtgccaaaccgggcagcatcgcgaccctgcgcggggcaccgagtgcgctgctgtgcgagtgggatccgccgcgtccttgctctgcccgcgccgccaccgccgccgtctcccggggcccccgcgcacgctcctccgcgtgctctcgcctaccgctgccgaggaaactgacggagcccgagcgcggcggcggggctcagagccaggcgagtcagctgatccggcccaccccgctcggcacccgagagagacccctagcggcgccgccggggaactgcgcccgctcgcgccgggaggggccctcgcgccccgcgcccacaggtgcacgcgcccttggcgccgcctgcaccccacgcgccccctccgctccccggccgacggcccacctgggcttcgtgaacagtgggagggagagtctggggccaggagagggacggtgcaggatcagggaaaggtgagtcctaggacgctgaggctctagaaaagtcgagagcgctcctgctcgtccccgtgagcttgaatcatccgaccccgcaggcctcccgggggtgtcgtataaaggactgctgctagggtgcgtttttatccgcatttcgttttttctctcggtttggagaggtggggcaggcgtttctggaagagaatgagaacgagtgaagcttaaaggaaataggattttctttgcttgttgagacagcaaaacctcattttttaacccccaacgtcaaaagcaggcacgagcaacctggaatttctatctttagaacgaaccaaaggagcaaggcgcaggacctggcaaagaagcggccaacccatttacttcttcttgaaagcagggttctgggcttgggttttgtttctttcttatatttttgtttgtttttggttttgttttgttaaagggggtggtcagtgtggattttgcggggcggggggtctttttttgttgttaagcagggatgtaacatccatctgagttggggaagaaggaaaaattaggagagatcattcgtattcgacccccgtaaatgaggacttctgacctcaaacgctgcccttgttcttcattgtgtctgtcctgaattatagaaatgaaccttctgccatgccactttctcctggattaaacacaaaccgtccactgtccagttagtgtccagatagtttagaatgctctagaactgcccagatatatcccctgctcttgacctgaagtagcatttagttaccaagccacagcccactccacacagggcttggagcgaaggactgaagccagggagtgctctggcccttctgagggctgcactgcagcctgccttctctcccttgctcattgcgctgacaagggtgcctaggcccgggaaggatggctcagccagcggggtacagacttccttcctgggaagtcatttctgtaccagctcccctaaatgttgtcttgtgtgtcttttcccgcactaggcattcagtcttgactcttggattacttttgcccctgaatgtcctttggatgtcctcaacaaataaggacaaatatttattgtcatgcagtatttgtttatacgcttcatgtcatttacttcctacaaaagccaaagaggctgttactattattcctatttatacatcaggaaaatgaagctaatgaactcccaaatctaatagcaagtaagtgacatgaagctgggacagcagggaaaagcctaaagtgacaggacaaacccagttgttcactttctgcaccacatttacccaccgcaattccgtatttgttccgggtctgcatgagcaaataaggcaaaaaagaaggtatctgaatgcaaagagaaacgtggtccaaagctacaaatcttgcagagtccactgcaaaatgcaaacgtgagaccctttgttacattattaagaattttaaggccgggcctggtggctcatgcctgtaatcccagcactttaggaggcccaggtgggcagatcacctgaggtcaggagttctagaccagcctggccaacatggtgaaacccccatctctactaaaaatgcaaaaattagccgagcgtggttactcctgcctgtaatcccagctactccagaggctgaggcaggagaatcgcttgaacctgggaggcggaggttgcagtgagccaagattgtgccattgcactccagcctgggcgacagagcgagactccacctcaaaaaaaagaaaaaaaattaaattaagaattttaagatggcaatggcagagcgttaaaccaagcatggggctcctcccaccgcagggcctgtgagactctccagggttgcatgcccatgaagccagccctgggaaggaggaggcaactttaagagtgagggacttttctttgggaggctgaggcgggcggatcacgaggtcaggagatcaacaccatcctggctaacacggtgaaaccccgtctctactaaaaatacaaaaaattagccgggcgtcgtggcgggcgcctgtagtcccagctactggggaggctgaggcaggagaatggcgtgaacccgggaggctgagcttgaagtgagccgagatcgcgccactgcactccagcctgggcgacagagcgagactccgtctcaaaaaaaaaaaaagagagtaaggaacttttattgagcatgaaattcaaaattgtagagatgagatcataatctataaaaattaaagttcttagatttagcagtttctctttccactgttgaaattcaccacactgacacattccctggtcaagatgttcctgggggaagatgattatgctgctgattgcgtcagaatgatggacattgcctgcatgttctctggttccttcactactcagagatcctgatggctttttgcttttcagccactagctctgttctgcatttaatgccatttcctgccctgaggtgtcttgcagatcctccaagcagaaaacgcaggaacatccctagttataaccctacaaagttggggaaggaaccaacaaccacttgtctgctggaattcctacaacagcatccccatcctagtttcaagtgtctccatttgtgagatattcactggctctccagactgtgcattctatctttgggcatttctggttactagaatgttcttatcccatttaaagctcacatcccccgcctttaaactcccactcagatatccttgtatccccagtgaccaagcagaataattcttttccacacttcagatctttacaaatttgccagcggttttcatgctacttcttcctctagagtcttctcttcacaaggtaaaacaggcacttccttcaacagttgcataatggcatggtttctggttccttccacaccttggccattctctaaatgtgttctggcttgtctgtgtctttttacagtactcgaagtgtgctctgactgctgcaacatgggagatgttgcccactactctgcctggagcctcatgttgcatttgactgttttagtaaccgcatcccactgcagactccaattggtccagataccccatttctattttatgcatagtctgctgggccgcgtttctgtcgtcttgtgtttaggctgttatctgtgccctataaatatcaccaaaagcaatcgttaagtctgagccagatgaaccctgcaggggtgccataacttaccatagactggatggatcaaacaccagaaatgtatttcctcacatttcaggaggctggaagtctgaaatcgaggtgttggctgagttggttacttctgaggcctctctccttggcttgcagatggccaccttctccctgtattctcacatggtcttccctctgtgtcttactgtgccctaatctcctcttgttataaggacagcagatattgggttaggatccatgctaatgacctcatttaaccttaattacatctttgaccctatctccaaatatggtcacattttgagacactgtcgggttaggacttcaacatatgaatttgggggtgggggtacataatatgtccttctttagaacagctaagacttattctataatcctgtcactcatctttggcctttatttccagtgacctttctttcattttcagtctgaagatcattcaactcaacagaaaaaaaaaaaatagaaatggaagagatctactttctgtctgtcctgcatcagcattgcatcatgatccccatgcagctggcttacccctcccgcaatcatcaggctctgaaaagaaagaaaatgaccttttatactttcctttagaaaattttgtcaaagcttaaacattgacatttaatgacatttaaaatctgtattagtttactagagctgccataacaaaatatcacagactgggtggcttaaaccaagaaatttattttctcacagttccagaaaagtctaagatcaagatgcagataggattggaatcctcagaggtctccttggcttgcagatggctgcacccttgctaagtcctcacacgttctttcctctgcacaggtacctctggtatttctgtgtgtcctaatctcctcctcttacaagaataccagccagattatattagggcccacgccagtggccttaatttaattagctcttcaaaggccctacccaaatacagtcatgttctaaggtactgggggttagggcttcaacatatgaattttgggggaacataagtctataaccaaacctctaaaattcccctaaaattattctcacattttaagctactctgatgtccgtccttgggagtggattccttctactttttattcatgtccttttgaaatcagaaaccttcctaggtaattagaatatttctttagctgcttcctggttgaatatatggattacttagccactccagacttccggtagtgttgggaattaccatgctttccatgaagatgtgagcttgctgggtatcatgtacgttggcagacgcagtgacgtatttgagagtttcacatgcctcttaacctgtctttcctcccagaaccgtgtgctaactcctcatcaaagaccagaagtagatcctgaattgtattcattctcatctctttctacctcctccaagacagaaggacatgattaacttctttatctcaatgtcagccttcaatagctacaaaagtctaaactgtaaatagcgttgaagctttgcataataaaattcttttccccagtgatgggcagtttttcacatagtaacattcttttaatctttttttctttttaatgagtagacataaagaaatgcttaaataaataattatcaactaacttacctacatttaactacacatacctaacagacctgaatataggcagaggatgtgacattttacttacccttttattaaagttactgcttcatttattggtctttacttcactagtgcatccataaaatgtttacatttttttaaacaataaaatactcttgaaattagtccttctctgtaatcactacataaaactgctttagagacagccttcagatcaactaaattatattttacaaaatggcttaggtatttcagtagtaactctatggaacaacagaattcactgtttaaccagggaccaatattggcagctggcttccataacttgtttgaggaatgtagtaattccaaggttgctgcaaggactaatgtacaggaatattcctgtattttatggaataaaaaggaagaacgagaggagaaagaaatagatagtacataccaaccccagaggtagggagtatgaaaatcaatcaagtagccagaagatgtaatggagccatgtgggtcttacgtcagttctcttccttagagaactttggataatagggcaacaatatgctctggtggaaaagaactcaggccttgagaaagcctgagcactacagtttctgaagaatgctcctttcattaggtggtgtggtgatgaattgtaaaggcacccagcacagtgcctggtttaccatagaaatcggttcttttttcttgagagaacaacaattcgcaatagctgtcacttaagtgaccagcataatcctggctttgagcttgccaggggctgccagttagaacaatggctgtcaaccccgtgttatttatttagatttcctaagtaatgttttgctaataaaagctccaaatttgtgagtgatttactcttgttttatttatttaataaagtggcacgatttattaatttaattaattatttaattaattattagcagtggcacaatctcagctcactgcaacctctacctcctgggctcaagtgatccttcacctcagcctccagagtagctggggctacaggtgcgcactaccatgtccagctaatttgtgtactttttgtagagatggggtcttgccatgttatccaggttggtcttaaactcctgagctcgtgatccaccctccttgatctcctaaaatgcagggattataggcatgagccactgtgtctggttgatttattttaatttaaataaaagcaactcgaggttagcatcatatcaggctactctcagttgtattctagtatctctcttgagtgtgggagtaagggatggagctgtagctagtttgctgagaactggacaaaaccctgaccactccctagggcgtgtgcctaggatgtgaaagatatgcctcctgttttcagacggcacccgtgcttggaaaggctgcttgccagaggtgttgaaaggatgccactgggctggtcctgcacaatggaagaccacatcacatgctccaagagagtcactccccagagcagctgcaggaagccacagctctgtggcctgggatccttgccacactgaatattagtgatagacattggagccgaggggatcttatgcttcaaggcagctggatctcttttttactggtcaaatcatacctaaggattgtctttcgtgtcctagagactttgatgagtaattcaacttttaaaatccaagtgaaggctgtggctagagaagcatgagctaaacctaaaatgaatgggaacattacagtctaacaagccttgagaattcaggttcacattccctaaagaaacaacatcctgaatgatgaaacaaacacacaaaccaaccaacaatttgtgatgtgagataccaaaacagacacccctttatcacctaagatggactgtaaggttaaggaaacaaagttacctacagggttagggttcggggactggctggcatgaccaatttctcaatttctatggctctaaactccctaataataggaactatcagccccatcctgtgatttacaacccagaccactacaactctaattggaatgaggaccagccttacaaacattcttttctgataagcaattgcagaccttaagccagtgtcagccagtttattagaggctgtgcacaaactgtctttgggtcctgtagttcaccttttgatgtaaagagccaaattttacctcattttaacactaaaaccctgccccaaagtgtacatgggatgtcacatacatatttacccattgcacatgcactcagctcccctcataaatatgtatatcttttcctccaaacctgctgaatatgtatgactccactgtgtgaaacagaccctgtgaggcatgaaacccaactgtccttcctctcttttgaagagagaccacattcagcatacaccgaagactatgtcttccgggtttgcaaattgatattgccaataaagctctcctttctgttatttagccatcacgatggtcttttgaatgataaattcacaaaagcaccaaatcattcaatatacaacgttgtccctgagcaaacacccaactttatcccttaaataacatttttgtcccgtgtgtaatttattcagttaaatataactattagaaatgaaagtgttcagtattggtggatcaataaaaaatttttatattctcactttgggtgggaattaaaaaaaaactggttcatttgctcccattaaggagctaatgtttatatgagaaaaatatctgggcaagaaaaagaaaaggcacagtgaaaaaagtacatcagtaaatacaatttagtataaagtatttgtgcacatatatgtgaattcatcagaagaaaagtaaggatcaggcctggtggcttgtgcctataatcccagcattttgggaggccaaggcaggaggatcacttgagcctaggagttcaagaccagtttgggctcaaaatgagaccctgtctctacaaaaaataaaatatattttttaaaatttaaaaattttggccaggcatgatggctcacacctgtattctcagcactttgggaggtcgaggtgggtgggttacttgaggtcaggtgtggtggtaggcacctgtaatcccagcaactcaggaggctgaggcaggagaattgcttgaacctgggaagtggaggttgcagtgagccgagatcgtgtcactgcactccagcctgggcgacagagcaagactccgtctgaaaaaaaaaataaaataaattaaaaaaataaaaattttttaaaaagaaaatgagagttacagacctgtagcgttggaagggtgaataagggaccttcagaggaggttttttgtttttgttttttatcagggtatttgataacaaccattaagaaagaagaaaggaggatgttcgaaggagaaaccatgtaaatacatcaagagtgttcatgatgggggtggtaagtgggagttagctataggaagaggtttttttttttgtttttttttttttgagactgactcttgctctgtcacctgggctggagtgcggtggtttgatctccactcactgcagcctcccccgctgccccgggttcaagtgattctcctgactcagcctcccgagtagctgggattacaggcacgcaccaccaggtccggctaatttttgtattttttagtacagacagggcttcaccatgttggccaggctggtcttgaactcttgacctcaagtgatctgcctgcctcagctgcctaaagtgttggaattacaggcatgagccagcacaaccggccaggaagaggtcttaatgttagaagacctgaggaatttaggtcagatggaataggcagcagtgggcaattagtcactacagatttaccaatcatgatctgacattttaacatttctagaggcttgtccacggggaaagtatagggagattcagaggatgaaaaagttgagattgggaagagaaggaagaagaatgtgccagaggttccaggaatgaacatagatagggtctgtgaaaagtttgtgaaaaaatcacacaaggacatcttattactaataaggatgcctaaggattacagtatgtcaggctgaggacgtatacagacgggatctctgaatactcatgagttgtattgggttaacattgcatgtcacaaatgaagaggtgaaagagtaaggggaagagaaaggagggtttgtacccagttctgtctaacctggacacctttagtgacaatgctgaactgcaaaggagaaaaagtgatttgaaaactttttttttttttttttttgagacagagtctcagtcttgctgtcttgcccaggcttgagtacagtggcgtgatcttggctcacggcaacctccgcctccagaactcaagctatcctcctgcctcagcctcctgagtaggggtgggattgcaggcacacatacacctggctaattttttttttttttgtattttgtatttttagtagagataggggtttcatcatgttgcctaggctggtcttgaactcctggcctcaagtgatccacccgcctcagcctcccaaagtgctgtgattgcaggcatgagccactgcacctggcctgaaatctttttttttaaatgagggaaataataaatttaatgttcattttgtaggtggaaatcagaagtacatgcaataggaattaacttgaatatgatgcataaagtttgaagcaaaggtgagtgatagatgaacattggtgatgtaactccggaagttgtctgtcataactgatgacttatccccatcatatgtgctgaaaactactcagatgaagttaacaacctgatattacaaaataagcatatatattttgtgtttataagaacctaataatcatctggagacttagtacttggggggtgagctatagatagccctgtgtatcagggttttccaaacaaacagaaccaatgggatatatatagatatataaagacacttcttataggaattggctcaggagattataaaggccaagaagttccaatatgtgccccctgcaagccgaagaaccaggaaatccagtgtaattcttgcatgtgaagctgaagggctgaagagtgtctgctggtattgaaggctcaagaacctggagctctgaagtcaagggcaggagcagatgatggatgtcccagcttcagaagagagagcaaatttgccttcctccacctcttttatgattcctatgctcagttaattgaatgatgcccactcacattagtgaggatgggtttttgatacccagtctattgattcaaatgctaatctcttccagaaatactctcacagactctcccagaaataatattttaccagctgtctgggcatcccttaacccaggatgggctaagagacaagtggacacataaagttaaccaccataccctgtaaatatggtatgagaagggatcgagtcatatttcatatcaagattattttccaatgcatagatgccttggaataatacttcttataaaataatgagtaacattttctagcacaagttccaaactgtgtaccatggaaccctagctcggtcatatgttgctcggtattgcatgcatacccgaaaagaattctgtaatcaagtaactttgagaaataagaggttaaacaaaattaaacaaataccttcactttaaaatgcatacaattctttaagatgataatctgcattttgaattttaaagagggtaggtagcttcagtatgtagcatcactccctctccctatttcttttttcttttttttttttttgagacatagtctctctcttttccccaggcatgatctctgctcactgcaacctctgcctccagggatcaagcaattctcatgcctcagcctcctgagtggctgggattacaggtgtgtgccaccatacccggctaatttttttttttgtatttttagtagagatggggtttcaccatgttggccaggctggtcttgaactcctgacctcaagtgatccacccacctcagcctcacaaagtgctgggattacgtgcacacacacctagctaatttttgtattttagaagagacggggtttcaccatgttgactgatctcgaactcctgacctcaagtgatccacctgcctgggtcacccaaagtgctgggattacaggcatgagccaccgcgcctgcctggcacctctccccattccttgtttttgtttgctgcaccaactcctagtgttgcacaaagcatgctttagggaatgtggtttggaagcattcgaatcaaacccttgaatttttttagacccttgtagaagtgaaggtttatagtgtacatttttgtcaaagcagatgggttcttttcactgaaagttgttttcacacatgaccttgaaaataaattaataaaaaaaaagtagaaatattaggctgacagacattttaaagtagggcataagatgccataaaaagccttttgaaagtttaaaataggagttaaagtgtgtgttatatggaagataccagattagagtctttgaatatttattatataaatgtgcaagtatatgaccagcttcttcccagtttgggggagtaatgggacggcattcagttcacatttgagactgcttctctttaaattttcgtaagtgaaaaggaagaaggatcactaagtttacaaagacaagtctcggaataagactttcgttcactgtattgcctttaatcatctggtgggagggccctcaagaagtggccaaggccctatgaagattggtgaagagtttcaaggaggagaattgaaggagacagctatgggattaattttgagagatgcctttgctgaaatgtctcataaaatatacatggagagcaagggcacaaggagacagagaactctctcggccaaacaataaatcagaatttccatagtttttctctgttagtccttattgaaaaatttgtctactgctaatggtgtcaagtagccctgccagccctcattattgtaccaaaaagcaaaacgaggaaaaggtttagggagctaggtctaaaaggaatatcatttctgtttcccaacaattagtgaaaacagattctgttaccaaaatcttgcagaaccaagggtcctaatacccactttattctggtgagtttgtcagtcgataaaaaatactaacaggccaggttcttttctcagataaacagtaaaataacatggttataaacagaaaaaaaatggtgaaaacacaaatcttggtgtattaggccattcttgcattgccaaaaagaaatatctgagactaggtagtttataaagaaaagaggccgggtgcaatggctcacacctgtaatcccagcactttgggaagctgaggtggacagataaccttaggtcaggagttcgagaccagcctggccaacgtggtgaaacctcatctctactaaaaatacaaaaattagctgggtgtggtggcatgcacctgtaatcctagctactcaggaggctgaggcaggagaatcacttgagcctcagagcagagatagtgccactgccttccagcgtgggccacaggatgagactccatctcaaaaaaaaagagagagagatttaatcagcttatgattcttcaggctttgcaggaagcctgatgctggcatctgcttggcttctggtgaggcctcaggaaacttacaatcatgatggaaggtgaagggggagtagggatgtcacatgaccagaccgggaacaagagaaagcatggtgccacacacttttaaacagccagatctcatgagaagtcactcatcacaaggacagcaacaaacagatagtgctaaacgattcatgagtaatccacccccatgatccaatcacctcctaccaggtcccgcctccaatactagggattacaattccacatgagatttgggtggggataagtacacaaactatatcattctgccccagcccctctcaaatctcatgtccctctctcatttcaaaatacaatcatgccttcccaacagtcctccaaggtcttgacttgttccagcattaactcaaaagtccaaagtccaaattccaagtccaaagtctcatctgagactcatctctttccatctatgagcctgtaaaatcaaaacaagttatttacttccaagatataatgggagtaccagcactgggtaaacattcccattccaaaagggagaaatcagccaaaagaaaggggctatagtcttcatgcaatttcaaaacccagcagggcagtcattaaaccttaaagttccaaaataatttcctttgactccatgtcccacatccagggcacactggagcaaggggtgggctcccaaggctatcagcagctctgcctctgtggctttgcagctgggtacagccctcatggctgctctcacaggttgttgagtgccatggcttttctaggcacaaggtgtaagctgctggtagatctgccattctcaggcctagaaggcaggggcccccttctcacagctctgccaggtcatgccccattggggactctgtgtggggtctccagcctcacacttccccttgtcactgccctagtagaggttatctttggaggctctgcacctgcaacaagtttctgcctgggcacccaggctttcttgtacagcctctgaaatttaggttgaggctgccaagcattctttaatcttatattctgtgcacctacatacataacactgtgtggaagcctccaagtcttatggcttgcattctccaaagtggcagcccaaactgtacctgggtccctttgaaccgcagctggagctggagtggctgggatatggagagcagtgttccaaggctgtgcagggcagtggggccttgggcctagcccacaaaaccattctttcttcctaggtctctgggtctgtgatggaaggagctgctgcaaaggtctcttaaataccttcaaggccttttccccattttcttggatattaccatctggattctttttagttatgcaaatatctctagcaagtggtttgctctgcaacctgcttggattcttcccatgaaaatgggctcagcttttcaaccacatggccagcctgcaaattttccaaacttatacgctgtccttcccttttaaatatgagttccagctttaagtcacttctttgctcctatatctgagtcgggctgctagaagcagccaggttaattcctaaatgctttgctgcttagaaatttcttctgccagataccctaggtcatcactcacaagttcaaacttccacacacccctggggcatgaagagaatgcagccaagttctttgctaatgcatagcacatgtgatctttgctccaattcccaataagttcctcatttccatctgagaccttggcaggcctggacttcactattcatatttctgtcagcattttggtgacaaccatttaaccagtttctaagatattccaaacttttcctcatcttcctgtcttctgagctctccaaactcttccaacctctgcccagttccaaagttacttccatgttttcagatatctttatatcaatgcccccattactcagcactaattttctgtgttacatcgttcttgcattgctgtaaagaaatacctgagatgggtaatttgtaaagaaaagaggactatttccctcacacttctgcaggctttacatgaatcacagtgctggcatctgcttgacttctggtgaagcttcagggagttttcaatcatggtggaatgcaaaggggaagcacacacatcacctggtgaaagcatgtgatgagcaagagagagagagcggttgggggtgttgccacacacttttaatgagaccagatctcatgtgaactcagagggagatctcacttatcaccaagggagtggcccaaggcattcatgagggatccacctccatgattgaaacatctcccaccaggccccacctctaacactgggattatacctcaacatgagatttagacaggggcaaatatccaaactctaccacctggttttcaggtcattctagagcactagcagctaccctggcttaaatcctgaaaagtatcaaatttatgtgtttttgaccgacataagaaaacaggtcaaagatttgcttagtccattgtaccatttctgccttaactacttgggagctactgggaattttctatttttaaaatcaggttgtatcaagattgtttggtgtttttcttttttcttttcttttttttttttttttttttgagacggagtcttgctctgtcgcccaggctggagggcagtgacgcgatctccgcttgcggcaagccccacctcccgggttcacaccattctcctgagcgcctcagcctcccgagtagctgggactacaggcatccgccaccatgcctggctaattttttgtatttttagtagagacggggtttcactctgttagccaggatgatctcgatctcctgacctcgtgatccacccaccttggcctcccagagtggtgtgattacaggcgtgagccactgcgcctggccctgtttggtgcttttcgaccaaaatctctaaacaactccaaaagccataaacagactaagctagaaaaaggcagacaaagatattagaaactaagcttgagtaactcaagtctttaatgctgtcttactagtctcagtaattcagcacctaggaaacatccacagaagacattttatcaatcaaaacaaagaagctcgggcaagcacagtgatgtgtgctcactcatagatagacttgtttttgaaattagtcttcagtgatattcattcagtgtgagatttagtctccataaaccgaagcacaacacaacttgaagctttactggacccttgggagtgagaagcagttctgtaatgtgtctgtgattaagtagcagtttcatcctgatttttcaagctcagagctctctaccctttcacatgcttgaagacaagatgttggacaactggcccagaggatgttttcctctcatttctgtaatcttctgataaggaaggaacgatgtgacttaacatgactctccttcaatctgaacgtgccagtgtaccttctttcccatcccactccatatatactctgtgtctgtcttttgttgttgttgttgttgtttgttttttgagacagagtctcactctgttgcccaggctagagtgcagtggcataatcatggctcactgcagcctcaacttccagggttcaagcagtcctctcacctcagtctcctgagtagctgggactacagttgggtaccaccatgcccagctaatttcttcaaatttttcatagagatggggtctcattatgttgcccaggctgatctcaaactcctgggctcaagcctcccaaagttcagggattgcaggagtgagccactgtgtctggcctccgtgactgtctgaagtctctctttcacaactctcttacagttcctgttagttgaggaaaaaaaatctggaattacagtgtttacaactgaaagggatgaagtagtcatttaggccaagtctttaatttgatgaggacttactggagagccagataaatgaagtcccttgcatatggtcatatgaatatttattggcaaagcttggcctttgtcctcctgacttccagatctcatttcatcttgtggtgcttccagcatctggccaccttgctagacctgagtcataaaagcaatggggcgctaagaccagccatactataggaagtggtgacagtttcctcatttaaagttgggttgtctttctagaatcttagagttggaactcaactcagaaatcacctgtttgatcctcccacaaaggcaggtgtctctcttgcaatattcttgagacaatcatctggcttctgcctccttattttctattatcgggagccagcttcaggaaataaaacatttcactagaatttttgtgttgttacatttagctaaaatttaccttctcttcacttctgtccttacatcccaacactgccccatgcagtaacaccaaatgcaaagacagactgtgctttcgaccacagggcactcctctagaagtgttaaaatacttatccagtatttcctcaagcttctctttttttctcaaagctaaatatctgatttttctaaactgtgccttataggttacagttgctggatcccttgtgatgctgaactttggatgtattccttttggcaaaatgactgtatcctacttatccaccaatttgacagatatttaataagcacctactaagttgcaggagatttaaaaaatacaagcatgtaaataagaaaatatacaaagtgatatataacaatacaggctgtggagaaaaattaagcagagcaaggggagatggaaaatttgtgtatggttaggagcttgggaccttgctattctattaatacagtgatcaggaaaggccccactgatgtagtgagctttgagcaaacaagtaaaggaaatgagggaggaagacttgcaactgtttggggagagaggatttgggcatagagaatagctcctgaggcagaaataagtctgatgtgtttggagaacagcgaggtggcccttgaggctccagtggagggcgtgagtgggagagtgggaggaagtgaggtcagggaggttgttatgggctgaatggtgtctccccggaattcacatgttgaagccataagccccagaacctcagcacatgactgtatttcgagataatgtctttaaagacctaaaatgaggtcactagggtgggccataatccaatatgactggtttcctcacaagaagaggaaattaggacacagatgggcacagggggaagaccatgtgacgacacagggagaagagagccatctataagccaagcagagaagcccccagagaagccaatcctgctgacaccttcatctcagcttccagcctccagaattgtgagaaaataaatttctgttgtttaaggcatccagtctctggtactttattatggctgtcctagaaagctaacacagaggggaaaagggccagatagtataagaccttgaaaaccattttaagttctttgagcagaaggggagccagtgagggtttcggagcagatgaaggtgatgactgggctcgtattttaaaagcatcactctagcttctgtactgaaagcagtctatggggaggcaaggacagaaggaagaaaaccaggaggaggctattgcagaaatgtacatgagggtggaaggtggtgaggagagggaagttttggaatatattctgaagttagagccaaaaggattttctgatgaactgaaattgtgatgtgagagaaagaaaggagtcaaagatgacccaaggcttttggccacagcaacttggagaacggagttaacattcattgagatggaaagaactgtaggagcagcgggcttttttttccttcttcaacttttaagttcaggggtacatgtggaggatgtgcagatttgttacataggtaaacgtgtgccatggtgatttgctgcacagatcaacccatcacataggtattaagccctgcgtccattagctatttttcctgatggagcagtgggttttaagggggaggaccaagagttcagtatggacacattaagattaagatgcctactcatctttgagtttgaaatgccagctaggctgttggatgcatgaatttagaattcagaggagtggtcagggtaaggatacagatggtactgagtgagatcacttagggtgaaatgaggacaaaaagaaggctttggaggctggggattgtggctcatgcctgtagtctcagcactttgagaagccgaggtgagtggatcacttgaggccaggagttcaagaccagcctggccaacatggcaaaaccctgtctctaccaaaaatacaaaaattagccaggtgtggtggcaggcattgtaatcccagctactcagaaggttgaggcatgagaatggcttgaacctgggaggcagaggttgcagtgagctgagatggcactactgcactcctgtctgggccacagagtgagacctggtccccctgagcacccccccaacaaagtaaaggatttgggattaagccctagtgtacttggaaatgttgaggttgttaagatgagcaggaaaaagagaagcaagcagaggaggggcagcgagtggagtaggaagagaaagagggtggtttccaaggagccaagtcaagaatgtgcttcgtgaggacagaatgattactgggttgatgctgcagatactgtgtgtcaaataaggtaaggactgcattgtatttagtgatagagaggtcattgctgacactgacaagagccagttcagaatggtggggacagaagtatgatttgagtgggctcaagagagagtaggggaaagaaatttgagtccagcaatgattaaaatattctttgggaagacttttgctgtgaagggagcaaaaagctgaaggtagctaaagagagataccaagagaaggtaattttattattattttttgagacggagctcactttgtcacccaggctggagtgcagtggtgggatcacagctcactgcagcctcaacctccttcactcaagcgatccttccacttcagccttctgagtagctggaactacaggcacgtgcaccacacccagctaatttttttatgagcttgagcctaggagttcaataccagtctgggcaacatagtgaagccccatctgtacaaaacaatacagaaattagtgcttgcttcagcagcacctatactaaaattggaatgatacggagaagtttagcacagcccctgtgcaagaatgacacgcacattcataaaacatttcatatatttgtagaagcacataggaaaaaaaatacaaaaattagccaggtgtggtggtgtatgcctgtagtcccagctacttgggaggctgaggcgggagaatcacctaagcccagaaggtcgagcctgcagtgagctgtgattgcaccactgcactccagcttgggagtggagtatcgcccagctggtcttgaacccctgggctcaagcgatcctcctgcctcggcctcccaaagtgcttagattacaggtatgagctgccgcacctggcaaagaggctttttttaattgaatatgtgaaaatatatttgtatgcagaggagaatgattctgtaacaaaggaaaatggacaaagcaggagaaggaacaattgttggaacaatgtcctagagtataagagagagtggcacactgaatacaagcacaggagttggtcttagatgggactgacatctctagctatattaccttatagacagccacatgtagctatttaaatgtaaattaatttaaaatgaagacaattaaattttttctggctgggctaggtggctcatgccacctcagcactttggaagcactttggaaggtcgaggtgggcggatcacgtgatgtcaggaggtcgagaccagcctggccaacatggcaacaccccatctgtactaaaaatacaaaaattagctggatgtggtggcatgcccctgtaatcccagctactcgggagcctgaggcaggagaatcgcttgaacctggaaggcggaggttgcagtgagctgagatcgtgccactgcactccagtctggaggacatagcaggactccatctcaaaaaaaaagaaaaaaaaaatccgttgtgctagccatatttcaagtgttcaatagctgcatatggttggcgactacagtactagacagcagcaacaaagaatattttggtcattacagaaagatctgctgagcatgcctgagctgagaaatgagggaaggcagacatatgtatgagcgcctatgcagagaggtgagtagatgtggttgcggggagcttgtggaaagtctttcctgatttcttctgtttctcactaaaggctacttaggagaaggacctggagctttgaggaaaaggtgcagactatatctttaggagatagagagagtgaggggacacggggaaaatggcagaattgcagaacaacttttaagatccacttcaggccagcacagtggctcacacccgtcatcccttttttaaaaactttgagacagggtcttgtgctataacctagactggagtgtggtggagcgatctcggctcactgcagcctcaacctccttgactcaagtgatcctcccacatcagcctccactacacccgactaatttttgtatattttgtagggacagggtttcactatgttgcccagactggtctcaaactcctagacttaagcaatctgcctgccttggcctcccaaagtgctgggcataagccaccacaactggccacacctgtaatcccaacactttgggagaccgaggtgcgagaatcgcttgaggccagttcaagatcatcctggacaacgtagtgagacctcttccaaacaaaaaagaattttaaaagttagtcaggtgtgaccgggtgtggtggctcatgcctgtaatcccagcactctgggaggctgaggtgggcagatcacaaggtcaagagatcaagaccatcctgggtaacatgttgaaaccccatctctactaaaaatacaaaaaattagccacgcgtggtggtgggcacctgtagtcccagctactcaggaggctgagggaggagaatggcgtgaacccgggaggcggagcttgcagtgagctgagatcgcgccactgcactccagcctgggtgacagagcaagactctgtctcaaaaaaaaaaaaaaaaaaaaagtcaggtatggtggttgtattagtccgttttcatgctgttgttaaaagacatacctgagaacgggcaattaacgaaagaaagaggtttaatcaacttacagttccacatgcctggggaggcctcacaatcctggcagaaggcaaggaagagcaagtcacatcttatgtggatggcagcaggcaaagagagagcttgtgcagagaaactcccatttttttttttaagccatcagatctcatgagacttattcattatcatgagagcagcacaggaaagattcacccccataattcaatcatttcccataattcaatcattatggaagctgcaagatgagatttgggtggggacacagaaccaaaccatatctgtggtgctcatctgtagtgctacctacttggggggctgaggccagaggagccctggaacccaggaatttgaggttgcagtgagctatggtgggccaccacactccagagccagcccatctctaaaaataatttttaaaatatccactttaggttagtgatctctaatttagggaaaccaatcagcatgctgtgtagttttttccaacttatgttcactggcatgaatgcactgttacagtaggtagaaagctggggctagtccaatgagtggttctctatcctggctgcatgttagaatcacctgggtgagttatttaaaaaaaaaaaaaaaaatcagaagcctcatccttgtagccaaaggatctgattgaacattctgaaaatggggcctgagcaacgaacaatctatttaaagctcccaaggtgattctaacacagacatgctttttttttttttttttttgagacaaggtctccctttgatgctcagactggagtgcagtggcgccatcttggcttaccgcaacctcagcctcccaggctcaagcgattctcctgcctcagtctcctgagtagctgggattacagacgcatgctactaccacctggctaattttttttgttctgtttttttttttttttttgtatttttattagagatggggtttcactgtgttggcctggctggccttgaactcctgacctcaaatgatccacccacctcaatctcccaaagtgctgggattacaggccagatacgtgtttaagaaccacggagttagagtaagaatgtggaggaaatgtgcagagtagagatgaaggatggggaactgtgttactgatggatcatgggttccacaggtgcaaagaaaggcactcaggatttgtgcagggatgggggacgggatgagattgagaagtgttcaaggctgatgagcaatgagagatgggctgggaatctagggcttcttgggtgacaaatacaaattgggtaaagggcacatggagatttgccatgctggtctaaatcagcacaatcaacataaatgtagtacagataattttaaatcttttattgaccttactagaaaagaaacaagtaaacttagtttaatagtatattttgttatccaatgtatgcaaaatattatttctttttttgttgtttttgcaaatttcttaaaaaaaaaaaatacagacagcatcttgctttgtcgaccaggctggtctcaaactcctggcctcaaactcctggcctcaagcagtcctaccacctcagcctcccaaaatgttgggactacacaaatgagccaccacacccagccccaaatatcatttcaacatgcaatcagtataaacattactgagatatttgtcatccttgtttttttatagttagtcttccaagtttgtgtgcattttacacttcaagcacatcccagttcagagcagacacatttcaagcgctcggtaaccacatgtgcagtggaccatgcaggtctaggtggtggtgatgaggtcgcaaatgttggatgatctctacagaacattcctttcagaatacaaacatactataatatactcaatcttaaggcagctgtatatgattatatagaattatgttcttatttaacccaatatagcttttccagaaaagtatcatgagagtcttagtcacatgctctgctaaagtccaaaaattccatgttggccacacttatctaatagaaattagtctggcatgaatttcctggtgaatccgtgcgagcatcagcttccagaggtgtcagtttcttttttctgtgtattctcatgccagtcttttaacaatccagtctgcctgcttgctttcatttgtgtggagctgatcttttcttattttctgacagttgaagttacttactctgggggagaaaggacgatgggaaaatgagcaaccacttgccatttaagtggtagcaaagctggatttgatttattagacctgatgctaggattccagattattataagcaagaaacggcttgcattgcttgtggaggatcacgtgacaaaggattgaccaatcgaccatggaaataacttgaaactaagttgccaaagagggggtggttggaggacaatgtctagataaaagggcaccaagaaaaatgaaggaaaggatgttatggagagaaaagcaacagagaagagtgccctcacacgtgctcgcagaaaaaaatcaggaagtcgactggggaaaaaaagtttgtgtggatgcttctctgtctacgtactgatgctcagagtgggaaagaagcaatctggtattttaacacagggaagtagacatggcttcatagatgacaccaagtgttggtagaataaaactgataactagagttaaggaatgagagtatagttctttttcaaaagaaactgacctgggagtatgctcttttgcttgcccagctggaaaaacatttaaaagctccctcttcaaacagacagcttgagtagccccagacccaggcgaactctttgtcattgtccatgccattagggcaggattttaaaacaggattctcacatcactgctctacgttggaacactgaatcagattatctttatcagacagtctacactctattccccctcttgttctggttttatgcatttctgtgctagactgagtacataatttgtcaataaagcacggattttgtgaatcagacacatccatgttaaaccggggtccatcatttcccacatggtgacatcattcctattagctaagcttagtctctatcctcctctacaaaatgaggataatgcaacatactccctggggctattatgaggctcctggggctattatgaggcttagggatgacatctgcgaagggcttggcaccaatgggcattcaataaatgctagttgggtatcgagactgtggactcaatttagacaaagatttttcatctggtttagctggttattatatatgacaaaaagagatcacaatgtgatagttggctaaagcagtctgagtcttaagtgaattctgctcagggccttaaaaatagacaaaggaaaaatgagagccaggctgggacatcttcaacaaaagtttgacatcattcttgtgaaagtattgggaggattctgatgggtggcctttagtctgacatatttcagccttcactctttctcatcaccttattgagctataattcacataccgtacaattcactcatttaaactgtacaatttaatagtttttagtatattcacagaggtgtgccaccattgccacagtcaatttgagggcattttcatcacttcaaaaacaaacccctctgcttctctctcccccagccctaggcaaccactaatctacattctttctctgtagatttccttgttctgggtattttatataaatggaatcatacattatgtggtcttttgtgattggcttctttcacttaacataatgtcttcaaagttcatccatgttgtatcacgtgtcagtacttcatttcttcttatgaccaaataccattccactggatggtataccttatttcatttgtctgtttgtcaattgatgggcatttgggttgtctccaccttttggccattatgaatactgttgctgtaaacatatgtgcataagtctttgtgtgggcattaaaaataaaaaatttcctttgagtatatgcctaggagtggaattgctgggtttcagccttctcttggtttttctgttacagggaagatcaagagttaaggactgtaccattatccccctaaaagactttcctgtaagaatcttaagttaataatgactgagcacctactgcataccaagtactattgtaggcactgggcagcttcagtaggcgtatcggattctagtctctcctgggtcaagatggagcctgacactagtgacaacttttattcacagcagtcataattgtaggctaccttatgggaacatctggtatgcccaacttacagggttgctgtgatactttgagtatcatgctttttctatttacttgtgtatgtctgcctttagctagaggcagtaaatgtggatcaaaaataaagatgtggggcccggcatggtgactcacgcctgtaatcccagcgctttgggaggccgaggcaggcagatcacttgaggtcaggagttcgagactagcctggccaacgtggtgaaaccctgtctctactaaaaatacaaaaattagccaggtgtggtggcgcatgcctgtaatcccagctacttgggcggctaagacaggagaattgcttgaacctgggaggcggaggttgtaatgagccgagattgcaccactgaactccagcctgggcgacagagcaagactctgtctcaaaataaataaatacatacatacatacatacatacatacatacatacatacatgcatacatatatgcataataaagatgtatgactttctttattgttgttgttttgagacaggatttcactctctagtccaggctggagtgctgtggtgtgatcctagctcactgcagccttgaactcctgggctgaagtgatcatcttgcctcagcctcccagacacctgggactacaggtgcacaccatcacggctggcgaatttatttatttatttattttttagagatagggccttgctgtgttgctcaggctggtcataaactcctggcctcaagcgatcttccactttgacctcccaaagtgctgggattgcaggcatgagcctccacacctggtgcagccgtacagctttcaaaaatgaagagaggaactcgtgggcactactggcatacatctaagaataaaatgtgaacaatctggttgttgtgttataacaacttggttaatacaatatgatattgatgagatgctcccaactcatcttggagtaactgaatgatgctacctgaaaggtagatatgagtaggaagtggaggtatacaggggctggagtggggcaaggaggctttccaggcatggagaaaagtgtaaactaagacacagcttatgtgagaaacaagcatagtacaagtaatctagtgttgctggatcataagggcttctgggataaagaatcttcaaagaaggagagatataattgcttaacatacagctcaccaatgggattatgcaatgatttataactgtcccctagatagctgtgtggcatcagacaagccattaacatctctgtgcctcatttgtcatcaaatgctgcatgggaataaaacgtcatgaattatctcctttctaaagtgacacatgaattgctaaaaaaaaaaaaaaaagaaaaattaagttctaaagaactttctttttttttctttttttgagatggagtctcactctgttgcccaagctagagtgcagtggtgcgatctcggctcactgcaagctcctcctccagggttcaagtgattctcctgcctcggcctcctgagtagctatgactataggcgcccgccatcacgcctggctaattttttgtatttttagtggagatggggtttcaccgtgttagccaggatggtcttgatctcctgacctcgtgatccgtctgcctcggtctcccaaagtgctgggattacaggcgtgagccactgcgcccaggctaagaactttctaatattgtcctatatgtagccaagccttgtgcagataaagattattattgccgtttgggacaagtggatgctttcagagagtcttagttgaggtttcctagaggctgaacctgagatagagatccttatgcaagtggtttattgaacttactagttttggaagaaactagtaagaaggtgagggaagcagaaaagggcaggaggagaagcaaatgcaaatgttaaaatagaaggatttaaccactttcaaaaagagggcactcatttacaaagtagtaaaggacacacatttaattatataaaaatgtgcatagatgtttggaaattttgacatgtagtcacagaataatgtgaaaattatatacaattattgacattcaaatagcagaaacatagaaagtcaaaggttggccatggatgaccctcatcaagggcaaatgtgtacacatctatgcacttatatttaatggcaatgaacttgtcagctacagcctgtttgacatttacagaatgatgtgtgataatgggattgatgaattcattagcattatgaatcatacataaatagaatctttagcacattttattaagtgtgaactaaaatatgttgtttggagaggacaaagattacaaatgttttaaactgggttcccaaagggcaaggaaaattaaacagtcagattccaccctaaatgatcaaaaggtggaatgtacatctcagtcacgttgtgctgatgtggcagtagggccagaggagttttggaaaatccaaagaagcacaaagcttgagtatgagcataaaggaaaacaccaagcgctgagtcagacactggacaagaagttcttttctgatttttcaaatgaaaagactgtacagttgagattaaggttcattaatttattgattcaaccaatatttagagagcacctcttacgtgctgggtcctgtggttgttgctgcagttacagacatgaagaggcaggaatgagctcccaagccaagtatgcaggattgtgtcatttctcgttccatgctttttgctaatcatgtctgggggtttataggctgtgtctacatttgtgtggtttcctagagatttcaaatattaaaaaatatccaaaccccttcccattgccttaaactcttcccttaattcatattccagaattggcacagggaaaaatggatctcttctttcccccaggaaaaaaaccccacaagcttatagttatggtaaattaattggtgaatattcttcattaactattctgtatcttaatttttttccctgaaaaatgaaaatgttacttataccactgggagcattttgctgattattagtatccaaggtataaaattttttgagattctgggaacaagaactcccccatggagagattaaactaccttctcttatacattatagagtttactatcttgatttatttcttcttgttgatctctaatccatccaataaccatagccactagtaattgtgaatatctttttattatatcgggtttcttgtaactttgaggattttgttttagtaaattaaatatattatttgtacatgtaattttgctgcatagaacaactggatttctggataagtagcttgaatgttatgtcctagagaataggagtttattacttgctaatatggcttattacattctgatgaatattttgactatgatctgagttgaattgataggaatacattttcgaagtacttaaaaattatttatggtggttcttttgtagtgttttcctttttataaaaccacactgtctgagaagaactctcttacttctgtgtcttaacttgtgggaacaatttatttatttatttattcatattagagatggggcctcataatgtttcccaggatggcctcaaacttctaggctcatgggaccctcccgcctcagcctcccaagtagctgggcctacagatgcccactgctgtccccgactatctatatgaattatctttatcattgaaaatttaggccaggcgaggtggcacatgcttgtaatcctagcactttgggaagctgaggcaggtggactacttgagcccaggtgttcaagaccagcctgggcaacatggtgaaatcctgtctctgtgaaaaataaaaaaattagtcaggggtagtggtgcacacctgtggtcccagctactcaggaggctgagataggattgcttgagcctgggaggttgaggctgcagtgagctgagatggcaccactgccttccagcctgggtgacagagtgagaccctgcctcaggaaaaaaaaaaaagaaaaaaagaaaaagaaattttatcaatgtgtttgtgctggtgtcagtttaaagcctatagagagtcttggaatttatgggatgttgaatttttaaaaattcatttgtattaagtggactttttataaaagagtaaatacctaattaaaataatattttatctgatgttaccaaagagttcttcatttcaacgttccatccctgagtaagttaacttatgaggaatgaattatattacctagcaacctccatccatcttaccacattgttaaaagcctatattctgcaaataattcacgtaatgaaacaataggcataaattaagttatacatttaattaacatatacataattaaattatatataccaagaaacattaaacttttaaacaattataaccaaattcattgctcatttcttctaaatcgatatttacatctttattgttaatttctaagaaaagccttaataagaaaaataacctaggagtatcttgaattagcaaatgtatgttttatagaaattctacattttatagattctatcactgcttctacagtacatacatttttatatttatggattcattggtatcctataaatagcctggatttttaatataatttatactactagagtataaattatactctagtataatggttctcaggtgcgcatatcagaagacaaacacagagatggttgacattgacatatagcagacttttatccccctaaaaatgcattttttttagcaggttcaaaattggaagcatgaattgaaacaacacagaaataacatgtttgcttacagtggataaattttgtactattttatagaaaacctctacaaatttaagacaagttaccgagcttgttgacaagttatgaggccatatgaaaagcaaacacacaaacaacaacaaactaggcactaagaaaaagtaaaaggaaattaaagttggtcattgcaatttaattaagacaatagtttgaatgcaaatgaagacataagacaaattcaatggaacattagaaattgtcttgcttggtactgtagtttatataagcagaagcggagacatactgaggttaagttttcatccaaagtcaccattagattgtggcagagctggctcctgtctcttgttgagtcttcttttcactgcctgacattgcctcttataaacaggacatggtgccagttaattataattgcttaagaaaaagcaattgaaaaaatggtgaatggtaattacatatgggctgaaataacattgatataatcaggaatatttgggggaggaaacaccattctagaacatctatttcaaccttggcaagctggaatgacaatctgcaactttatttttaccagttatcacttactggtataatgaaacaaatgctaaccgtaaaatttaattattaaatcaaatattaaaataatttataaacatgtttaaatcacattgcacaaaggaaagaaaaggggttgtatcattttcaggcataaaatcatttccttcttccttttaatttgatgttagaccagcttttttcatagtcaaatttgtacggaaatgcccagagagggcaaacaaggagcttaacagatgtcattttgctattctgtgaagctaaatagaactgtagtttattgaatgatttctcttacttctacttctgcttgaatgtagattgggggatggatagtagctgagtccaatttaatttgttcaattactcaccatttgatttatttatatcatatgataaattaatcagtttgttttaatctatactctgtatagggtttacaataagaacatcatttaaagtatggagtgcaactcttacaggttatatatattcattttattttacgaaaatttaatgtcatatacttatgcatttaataatatataccaaatatttataacaattcatcaagcttgacatttttttaaacaagaataaaatttcaagaaagttggaagaaaatacaaagaatttttgctccctctcctcatccatttgaaagcaaattgccaatacgatgccttatgaccccagaatgcctcggtagattacaaatgaagacactatcatacaacaaaatacaaccattgaaatcaggaaattaaccttgatattattaacatcaagcttgccagttgtgtagaaagaggatccagtttagaatcatgggctgcattttactgccctgtctcttaagcatttgtaggctttggaaagtttaaattttttcttgagtttcataaatttgacaattttgaaactcatagcctagatattttgtggactatcacttaatatggatttggctgattttatctcatgattaaatccatgcatctttggcagggatatcacagaaataatgctgctccctcattgcatgctgtctgtggtgcatgactgtgacttgttcagttactgatgatgcctctgtgataactgggttaaagtggtgattgccaggtttcttcacagtcgtttactctttcctctttaagaaataataagtatttcatggtgaagtactttaaaactctgcaaacatctcattcctcttcaaactttcatgttattcatttctttctttatatcttttctttttcttttctttctttcttttttttttttttttttttgagacagagtttcactcttgtcacccaggctggagtgcaatggcatgatcacggctcactgcaacctctgcctcctgggttaaagtgattctcctgtctcagcctcctaagtagctgggattacaggcacccaccaccatacccagctagtttttgtactttttgtagagacaggatttcaccatgttggccaggctggtcatgaactcctgacctcaggtgatccacctgcctgggcctcccaaagtgctgggattacaggcatgagccaccacacctggcctctttctttatacctttatagatttgtggtctacttatttaatggactaaaatccactactatgattatttattttaatgttccaattgttgctgtgggcaccactttgattgcttttataatcttttgatatttctctattattctttaagtatttcctgactttctggtacagcaaaagattctaggctcattttgtactttttctttcccatccaggaattggtcattttgctaaagggtcctgtttctttgtaacgagaatagtatttagaagccaagatttggttgctaaatgtactcattactcttggggtgccactgcctccagactgtttcagaggacaaaaactaaggaatatataataatatgcagacatgcacccatatatatgttacttatatgtctacatttatatacatttataaattcataccaattccttccatttcagttcaataccattgagttcattctatttttctttcatttcaatatttgtagctttcttctctgacagttgagaaacctggtttgccaattatactgaatatatttatttatttcatcacacctgtttccctccaacagtccgctatatgtggctaagcttccattgccattctactctccaccatccacgggtgctgttgcattctgcttaggctctgctggcctcggccaggccatccctccatgaagatgccgtctttttttctttttttgagatggagtctcgctctgtcgcccaggctggagtgcagtggcacgatctcggctcactgcaagctctgcctcccagattcacgccattctcctgcctcagcctcccgagtaactgggacggactacaggcgcccaccaccgcgcccgactcattttttttttttttgtattttcagtagagatggcatttcaccatgttagccaggatgatctcgatctcctgactttgtgatccacctgccttggcctcccaaagtgctgggattacaggcatgagccactgcacctggccttgttatggtgcctttttatttctttgctcctaagaaatagtcctggactttgtgatgctaccttactgtaacatcaatgttaatgcttttaaatattttccacaggtgttaagtcatttattactttactaagtcacagagtgccatacattttatatgaaggatagggatccatttcctcaaattataactgctagtaagacagaagcatagtgtgatggtttattttaggtgtcaacttgactggattaatggatacctacataactggtaagacattctgtctgggtgtgtcacaccaatctcttagatggactaaaccgggaagatccaccctcaacacaggtgagcaccatccaatcggctgggggaccacatagaacaaaaaggcagagaaaaggtgaatttgatttctctctcttctggagctggaacaccctcttctgctgcccttggacatcagaatcccaggttttccagcatttgggctccaggactcataaaagaagcagccctctgtgtaatcaggctgtaagcctcagactgagagttacatcgtcagcttcttttgttctgaggctttctgacttgggctgacccgtgctgccacctctcctgattctccagcttgcagactccctatggtgggacttcttagcttccatgatcatgtgagccaattcccctaataaatttcctgttatctatgtaactatctgccattggcatccaaaccagagtgattcactcttcaataaaggctgaatgaagtgagaccttctaggttacattcccaggaatttaggtactcttggtcataagatgtttatggttgaaggaacaagttaattatgctaattaagacccagaacttaaggaaatgtcctgatatccagatatcttaagaacagaccaggcaaggtggtgcacacctacaatcccagcacttttggaggctgaggcaggtggatcacttgaccagactgggcaatatagtgcaactccatctctccaaaaaatacaaacattagccaagagtgatggcacacacctgtgaccccagctacttaagaggttgaggtgggaggattacctgagtatggggacatccaggctgcagtgagccatgattgtgccactgcaccccagcctatgcaacagaataaaaagcattcttagtttaggaataggtttcgctttaaagattatagtacatccataaattcttgctgatatcaataggtaaacaaaagaagaacaatactaatagactgttacaagctaatcacaagcctttgtataataataaagcacattattcttagttctaacattgtatataagcaagcattatgtttgacgtaggggcgttccttctctcgctttctgaggatgccctactctgtaataagagtagtctctagtaaactatcttaatttcactctactctgctactcacactgaagtcattcctgtctgaaatccaagaacccactcttggggtctgggacaagaccctttttctagtaacatctatctatcttctatctatctcccgcctattggttctatctctttggagaactctaatacacacagtaaagttaagattaacacacagaagcaggtcatggattattcaggtggaaccacaggggacatttggttgggattgcatgattaacgccctaccatgtcatgtcattgatcaatggtcacttctttcctgagcattagcatgtctctaagatttgctcttatctatcaaatgaatgcagaatgccattcatgtgataaaccccaacaggtcccacagaattttcacagtctattgtgtcaagttgtacttaagagagattttttactttatggatcaatgactggatagatcaaaatgaatcctttaaagctatcatattttatcagtttgctgcagttgtcttgcaggctcaatgaaaccatgtttcctagagtccaaaaatctgggaggtgaccatcgactcttctagatgagctggtgttctctgcttaactaactgctcaagttcattccatgagggagaaacctccctttttgactttgaataccactgctgagaattgtgcttctatttcactttgtggaatgcttgaagtgatttttacagaattctttttggaaatgttaatacttgtggaacaaatggcttattgttaaacttggagctggaagacctggatttgaatgcggatattgccagttactagcagtgtgacctcagtttcttcagtaaaacaggatattatcattgtctgacaaagttttttgggcctcagttaaaaaaatgttaagttaaagtcatttcggttcttgaaagtgccaagcaaatgtgaggcactattagtattttgtaaaaagccatttctttaaagggaagacaattcatgaagaaaaaattcaaatgaaagcaaagtaataaataaaattaccgtaagaactgatgagagaattctgattttgtagatggaaatttgtttttgaatttaatgaatatacatatatttactcctttaagtagttattttatgtttcaaaaagattcaaacattttaattgcaaaaagtctttgccttgctttaaaagcaagtttaatttcagggacaatacacctattcattacccaaaccattcctaagcagtaacagccttaagagcctattaatgtaagggggggtgttaagtcttattcaaaatgaattgaacccctgactccaagtcagctagtttatattctaagacaatgaaaattaagaacaatgatttagcgactcgagaagactcaatctaatatgatccgaaaaaggccaattatcgtaactcttttagccaatattaacttctgaatgtgtcaaattctccatcttggaaaaactgtgttgactccagcagacataagaagttttcttctctcattaacaaaccttctatgttagaccagaggaagaagcatttaactggcattattctaaaaataatgaaacaattcaacaaatacatattttataatgattttgtattaaaatagaactggttttacttaattggttgtaatttaaagttcaaaatcttaaaaatatatttgttgtaaaaatgtcaccaggttctgtgttatctcttttcaattttccttgaaagagttgctcattatgatatttaaattcttgtgtcttacatttgaaaattagtactgatttttcaatacaaaaaatcctatcgaaacagcttgaaatcttagcagtctttgtacttttcataacatattttattatacatattttatatacaaataaataattaaaaatatataaattttatttttaatttttttgaaacagggtcttgctctgtcacccaagctggagtgccatggcacgatcttggctcactgcaacctccacttcccaggttcaagtgattcttctgcctcagcctcccaagtagctgggattataggtgtgcaccaccatgcctggctaatttttctatttttagtagagacggggtttcaccatgtaggccaggttggtcttgaactcctgacctcaagtgatccacccgcctcagcctcccaaaatgctgggattacaggtgtgagccactgcatccagctctgtattatatactgtagtagtctgtacaaacaaaagcatgtatagaattttggcattcatgttgaaaatatgaccacagatttcttcttaggtacatgggaagattgccttgtattctagttttaggtttcagcaatttcaccactgaccattttattgaaatcatgtagtgctgtaggtagtcagataatgagatgccacttaaaaggcctgaaatacttggggttgcataatggggatgtatgtactacgttagaggctaattccaaaatttggggaaagactaataaaatgtttctcttgtcaactgaagaatgatgaggttcataaatttagaaaggtgagctttgttttttataaagaattgcagccctcgggtggccattctgacagggttggaagtgtagcctcctgccagaagccagaaaccggcactttgagggagggaagaataagacaggaatttatgctgaatgcggtggttgaatatacatttttgtttgtttgtttgtttgtttgtttagacagagtcttgctctgtcacccaggctggagtgcagtggcacaatctcagctcactgcaacctctgcctcccaggttcaagtgatactcctgtcacagtctcccgagtagctgggattacaggcacccaccaccacgcctggcttatttttgcattttttaatagagatggggtttcaccatgttggctaggctggtctcaaactcctgacctcaagtgatccatctgcctcggccttccagttgtttgtttttgaggcagagtctcactgttgcccaggctggagttcagtggccccaacttggctcactgcaacctctgcctcccaggttcaagtgattctcatgcctcagcctcccaagtagctggggttacaggcgtgtgtcaccaagcctggccaatttttgtatttttagtagagacggggtttcgccatgttggtcaggctggtcttgaacttctggcctcaagtgagcctcccgtctcagactcccaaaatcctgggattacaggcatgagccaccatgccccacctgaatatacatatttaatcagctataggaaaaggcacaaatatacgaaaagagaaacgtgcacatagttgagcttcatgcctgtccatgggcatcatgttcaaaatatggtggcattagtataatctgaggatggagttttcagccctctgactcaaaaggtgaagcaggcaacacaaaaaccctcactatgcatcctctataaaccggccagagccacttcatgttcggtgttcttttgtcaggaaggaaagctgagtggtcgttttgtcaaaactgcaaaaggaaggatagtcacaaggttggtggaaatcactggcggagccagtctttcccaatggctggtttctgtttaacccttaagaaagaaagcctcatggctgttagcaaggttgcaggggaggtgaacgaggcatgttcaatcttccatgtcatcatggccaggagcacagttttcaaggtttctctgcagtaccctttgccaagagagagttctattcagctggttggggggctcaggattttatttttatttctcactcttaaggggaacatcaacttagagggtcttgtccatgagactgaaatgtcttccagttgtcttcgagaagaatgtcctcatttgagtttccctgaaagcagagggcctgagacaagtatgtgggctcaggtagtttctttgggaattaatcccaggaagcagaagtgagagagtagaggcatgggaaaacatggagttattgagctagctacccctgtggaaaactggggctccattctgttgaagagcttctaagaaactttgtggaatccctcagacatgtttcagggaaggacagggagactgggacacccgtctattaattcagtctcccattgattgtgggttttgctagaggcactttggcaccatgcacttccaagtgtgcctgtttaggggagaggcaggctgagttgctttcagtgactgcagagaaatccaaattgtgagatgccacagcacagcttgaggtgggatgctggttgcttgcacagacttgtccttcgcagcagtgctgaaatctagtggccaagggaagtggttgaggcaccacaagtgtctgctacagataagagaaagcaaatagtataaaagaagttattatccaattatttctaatagagttgagggagtgtcattgctgtagggtcatggtctgtacagagtggtgtatgagatgaggacgtgctaccccaaaatatgcctctttggcgtaaagattactttgagctgatcatttttagacactagacacaagagaagttttgaaaacacaaacatttcccttttgtaagggaaacttacacctataaagaaaaatgtccatttgtaagtgtgtctccctctctgtacgaagaagggaaagatgattaaattactagagacccacccacctaaatctgcataacaagccttactcttatttactgtgctgtttccagtcacatccccattactggccttcccaacacccttctttctttgtttcagcagaagatggtgcttaagcctgaattctaagtcacctcttggagatttgctcatttctttgggtatctcccagtatacatgaggtatatatgttattaaacttccgtttgctatactatgcagccataaaaaaggatgagttcatgtcctttgtagggacatggatgaagctggaaaccatcattctgagcaaactatcgcaaggacagaaaatcaaacgccgcatgttcccacccataggtgggaaatgaacaataacacttggacacagggtggggaacataacacactggggcctgtcgtggagtcggggtaggaggagggatagcattaggagaaatacctaatgtaaatgacaaattaacgggtgcagcaaaccaacatggcacatgtatacatatgtaacaaacctgcacgttgtgcacacgtaccttagaacttaaagtataataataaaagtaaataaataaataaacttccgtttgcttttctcttgttaatgtgtcttctgttacaggggtccatctcaactaagaactctgaaagttagaaagaaaattatttttccttccctacagtttaaaatgagagttaaaggcattttcttgtattacacagaagaaggagaatgctgtgatttttcttgattaatgttgagtatcgaaatggatgtctttctataatgactggagtctaattagctatcctgatttgaagaaagcaggttttcagaaacacagtgtcatatgttcctcctaagttcattaagtaaccagtgatctgcaatttggtatcccagatggacctaccctcaggaagtgaatgtcctgtgcaaagggctatttttcagataaagctcccaagatatggaatagtgttgtagaaaaaaattgggttcttgtcatgcgaccaggaaaatttagacatgcagatgcattgtagggtgagtagggcaggatttattaagtgaaaagaaaatgggaaagaggaactctcagcaaagcgagagagagtcctgccagcaggtctcttgcctcacagattgaatcccaggtcaccacccaggaactgaagaggccaggctcctccccgctgcaaaaggtgcagacttcccaaggctccgccctcgtcctcccggtgcataggtggacattattcagaatcagtcgggaaagggcgggtttcatctgggaccagcagtttggtttttcagccttcaggctgttttatgcttggaggtggggaccctttcgccggggacccatggctggcttctgtctctatcaatagcatatttgagtgcagggctgaggcagcctcttggaggcttattatcatgtatcaaattcttaccccagagaaaatcagagttgtgatttgaagcgttattagggtaattgcatctgagattttgaataatcatcaacagtcacctaatctgcatcacttattttataaaaaggctaatagacattaataatttacctaacatcaaatagtttgtgaacagacaggctggaactcttcagactggaattcagttcaatactctgcaatggcatcatagataatatgcatttgtcaatttgcataatcaatattttatttttgtaccatgcaggatcattgtttaagtacacagtgatatacttcctgacctttagaattttaaatcactgggcttagtgaaatcccccaaacacatttaaaaactcatagaaaggcatatgaatgcaagcatttggagtgttctgaataccaaaagccaaaaccagtacaggtaaatgacaagcatcacttaaaaagaatgtctgaacagctggctgaataaatcagccaaagttgaaacactcttttcacttgtctgtgaaatttttcttcctagaagtgagggagtcccttgagggaaagaggataacaggtaagcgtattcactgtttgccacttctagaaataaaatgctgcgtatgtattcatatgtatgatatataacacacaactaaacttttttttttttgagacaatgtctctctttgttgcccaggctggaatgcactggtgtaatcacagctcatggctcacagcccacctcctgggctcaagggatcctcccatctcagccttccgagtggctgggaccataggtgcacactaccatgcctggctaattttaaaattttttatagagatagggtcccattacgttgcccgggctggccttgaattactggcctcaagcaatcctctggccttggcctcccaaagtgctgggattacaggtgtgaaccactgcacccaaccacaagtaaacttttgaatccaaggagacacatggtgtggggtccagactgctgtgaccatcctatgtcaggacaagtctagtgcttcactatcaaagacatttctgaaacatggcctgggcttggtggctcacgcctgtaatcccagcactttgggaggccgaggcaggcagatcacctgaggtccagagttcgagaccagcttggccaacatggtgaaaccctgtctctactaaaaatacaaaaattagcctggcatggtgacgacctcctgtaatcgcagctactagggaggctgaggcaggggaaacgcttggacctgggaggtggaggttgcggtgagccaagattgcatcactgcactccagcctgggtgacacaatgagatactatcttaacaaacaaacaagcaaacaaacaaaaaatgaaagaaagaaagaaagaaaaagaaatttctgaagcagaataaaacaccagccactgaaattggatttaatataagtgctttgtgactttggtttatacttttgttgctagggacatggaattttcatttttacctccagcttggaaccagccataagccagtgtctcctcatggctagctaagagcatttcctagtctgtttgggaaggagatagaacctcattttcctttctacattccctatgaggcactcaaattccttgaaatcatatttcccaggaatcacaaatgaaccaatctaaactctgtggggatgatagactttcttgaggtcctctggatttcctaggtccaaggattggtatttgtggtagtgggtgatgcccaagggtgaaggagaactgttactatattcagaaccctgagagttcattctgtccttcacttgaaggaaaactatcaacaggtaacagcaccccttagacttgctccttcttctgtggatgcccttttctggccatgggcacttgaaggaaatgaatgagagacccaggacataggcgctggggaaggagtagagattgatgtcagctctttcctggaaaggttaacagaaactacagggcatgatttattgaaataatctgggtgaaaatgcttgtatatgctaatcttattttttattttattttgttttatttttgagacaggctctccctctgtcacccaggctggaatgcagtggcatgatcttggctcactgcagacttcgcctccgaattcatgtgattctcccacctcagcctcctgagtagctgggattacaggtgcgtcccaccacttctggctaatttttttttatttttttattattattttttttttagtagagacagggtttcaccatgttggtcaggcttgtctggatctcctgacctcaggtgatccgcccgcctcggcctcccaaagtgctgggattacaggtgtgagccaccgtgcctagcctaatcttatgttttaatttcaaatattatttttataattaatgttcacatcccttatttattgaatgaaaacaatgcaatgggttagataagtgctagaactaatgctctataataaactctaaaaaaccctagccggctgggcgcagtggctcatgcctgtaatcccagcactttgggaggccgaggcgggcggatcacaaggtcaggagatcgagaccatcctggctaacacagtgaaaccccatctctactaaaaatacaaaaaattagccgggcatggtggcgggtgcctgtactcccagctactcaggaggctgaggcaggagaatggtgtgaacccgggagacggagcttgcagtgagccgagattgagccacctcactccagcctgggtgacagagcgagactccatctcaaaaaaaaaaaaaaaaaaaacaccctttcttggtggaaaacgtcaaaactatttaaagggagtgagaatagtataacgaacctgggtatgcatctaatctagctccaacaattatacaatatcagttcacagccaattttatttgatctatatctctctctgtccctcctcaaattatttcgaggcaaataccggacatatttacatttacctttaatcttttcttttcttttttttttttttagatacagggtctcactctgttgcccaggctggagaacagtggcacgatcatgcgttattcactgcagacttgaactcctggcctcaagcaatctttctaccttgacctcccaaagtgctgggattacaggtgtgagccactgtgtttagcctagacttacctttaatagcttttgataagttattttttaatgtaattttgataaaataattgtacctaaaatgtactaatgtgttggtattgtctactatccaatctacgaacaaattttactgattcattcgtaactgaccccagagttggtttgtttgaatcactgtaactgagcctctattataaagatcatacgatgtttgttttacctactttccctttccccttgtccttttcttgctctatgcgtgcttgcttgcatgtcattatttcagtagagggtagtcactaataattgattaacttcatatcctaacctacaggggtgcctggcagattgatgaacttgtttttcttttaaagaaccatgatccttaggttatgcagacctccttgatggtgtccagaaatttgggtagagggatgccaacagctttgatcactgggggagtttcatctcccatatacccaccttactcatacaagtccccagttaaattcaaaggcagggcagatttgagagactgtctctcctgccctcttgctttggtcaaattgaataaacctttctctgttcctgagtgctgatgtgtcagtgtttggcttaccatgcatcaggtgcacagacctaaatttggagattctgtaacatcaagacccatatgacgttcacatactggattaggctgatgactcatatatctctcttttaatgtgtgaccatttacatctctttctctctctcctcccttttttttttttttttggcaatttctttgttattaatggtcttgttttaaagtgaagtattgtcatttaagtttatatatcaatgttatcattatttgtttatttacaacaaagttttatgccaaggcagtcatgccattacccacctgacctgcttttccaccatcagttttacctgtgtgtgtccctggatcatcaggaagcattgattgagaatctttttctcttaatctgccttactattttctaatgtagttactgatcaaacttagcagtaacccactcattttgtgtgtaggcaaaagcaactatgaataaacagaagaagtctcccacagtgggtaaatgtgtggacctgggtttgaaacctgatgaaacttgctggctgtgaccccttgggccagggattaactgctgtcactcttagttccctcaaccctcaggtgcatgtgattatattcactgcctgatatggtttggctctgtgtccccacccaactctcatcttgtagctcccataattcccacgtgttgtgggagggacccggtgggaggtgatggaatcatgggggtgggtctttcctgtgctgttcttgtgatagtgaatgtgtctcatgagatctgatggttttaaaaacgggagtcctcctgcacaagttctctctttgcctgctgccatccacataagatgtaacttcctcctcctttccttctgctgtgattgtgtatcctccccagccacatggaactgtaagttcaataaacttctttcttttgtaaattgcccagtctcaggtatatctttatcagcagcatgagaacagatcaatacagtaatttggtagcaggtagtggggtgctactctaaagatacctgaaaatgtggaagtgattttggaactgggtaacaggcagaggttggaacagtttggagggctcagaagacaggaaaatgtggaaagtttgaaactccctagagagttgttgaatgactttgaccaaaatggtgataatgatatggacaatgaaatccaggctgaggtggtctcagatggggatgaggaactttttgggaagtagagcaaaggttatgtcttgttatgtgttagcaaagagactggtgggattttgcccctgacctagagatttgtggaaccttgagcttgagagagatcatttagggtatctggcagaagaaatttctaagcagcaaagcattcaagaggtaacttgggtgctgttaaaggcatttagttttataagggaagcagggcatgaaagtttggaaaatttgcagcctgacaatgcaatagaaaagaaaatcccatattctgaggagaaaatcaagctggctgcagaaatttgcatatgtaacaaggagttaaatgttaatccccaagacaatggggaaaatgtctccagggcatgccagaggtcttcacagcagcccctcccatcacaggcctgcaggcctaggaggaaaaagtgatctcttgggccaggcccagggtccccatgctgtgtgcagcctggggacttggtgccttgtgtcccagctgctccagccatggctgaaaggggccaacatagagctcggattgtggcttcagagggtgcaagctgtaagccttggcagcttccatgtggtgttgagcctgccagtgcacagaagtcaaaaattggggtttgggaacctctgcctagatttcagaagatgtatggaaatgcctggatgccctggcagaagtctgctgtaggggaggggccctcatggagaatctctgctagggcagtacagaagggaaatgtgggatcggagccccagcacagaatccctactggggcaccgcctagtggagctgtgagaagagggccaccatcctccagaccccagaatgatagatccactgacagcttgctccatgcacctggaaaaaccgcagacaacaccagcccatgaaagcagctaggcaggaggctgtaccctgcaaagccacaggggcggagctgcccaagatcatgggaacccacctcttgcatcagcatgacctggatgtgagatttggagttaaaggagatcattttggagctttaagatttgactgcccctctagatttcagacttgcatggggcctgtagcccctttgttttactcaatttctcccatttggaacagctgtgtttacacaatacctgtacccccattgtatctaggaagtagctaacttgcttttgattttacaggctcataggtagaagtgacttgccttgtctcaaatgagatgttggactgtggacttttgagttaatgctgacatgagttaacactttgggggactgtttggagcacatgattggttgtgaaatgtgaagacatgagatttgggaggggcaaggtgtggagtgatatggtttggctctgtgtccccacccaaatctcatcttgtagctcccataactcccacttgttgtgggagggacccagtgggagatgattacatcatggggctgggtctttctcttgctgttctcatgatagtgaatgggtctcacaagatctgatggttttaaaaacgggagtatgcctgcacaagctctctctttgcctgctgccatccacataagatgtgacttcctcttccttgccttctgccatgattgtgtggtctccccagccatgtgaaactgtaagtacaataaacttctttcttttgtaaattgcccgctcttgggtatgtctttatcagcagcatgaaaatgaactaacacactaccttagagtgttagtgtgaaaagaggcaatgtttgaaaatttttagcttggtgctgcccacactgtgagcattcagtaattgtgagctgtaatgctcactgttgtgttccattcccacagtaatttttgtgtatgtgttttgattttttagacttaaaaaatacagttttagatttatagaacaattgaacagataatacatagagttctatacacccaccccatccctacctctcaatttccctccacaatttcccctattattaacaacttgcattggtgtggtacatttgttaaaattaatgaaccaatattgatacatgattgttaactatagtccatagtttacatgagggctcactctttgtgttgtgtacttctatggttttgacaagagtataataacacatatccactgaaagggatcagaatatgctaccccaaaatattctactttggcataagaattattttgagctgaaggcaatttagaagcagcagactcaggaagagctctctgacctctcttttctgcctaaaagcaggggataaatttcccttttcccatactgaggagaggagaatgattctccattcttacaaccagagagaacttgagtttgtgtagcaaatctcagtaaacagcccttatctaccatgtacttcctagtcaccttctcccaatttaccacccctaggaacccaagctccccatttcttttgtctagtcatgtctccccgagttatcatcctttgctaaaatggtgtattagtcccttttcatgctgctgataaagacatacgctagactgggtaatttataaagaaaaagaaatttcatggactcacagttccatgtggctgaggaggcctcacaatcatggcagaaggtgaaagatatgtcttatatagtggcaggcaaaaagagagagtgagaaccaaacgaaagggtttccccttataaaaccatcagatctcatgagacttatttagtaccatgagaacaatatgggttaaacccatgattcagttatctcccactgggtccctcccacaacatgtgggaattatgggagctacaattcaagatgagacttgggtggggacagagccaaaccatatcacatggtatataagccccagggtctaactacctctctgagttttcagttctcttctatgaagcccctgtggacataaaattaaaaataaactttgtctgcctcttctctgattaatctatcttttttcagtttaactcttaaattccagccacagaaactaagagggtagaggaagtttttcctcccctacatattcattatagtttcatacagaacaatttaaccaccctaaacataccctgtgtacctattcatctttctctccctcccttaaaatctctggcagccactgtctttactgtctctatagttttgccttttccaaaatgtcatatggctggaatcatatagcacgtatcttttttagtctgctgtctttcacttagcgatatgacttaaagtttcatttaaaaaaacgcatgtgatttgtagttaatggaaaggattacataaagcacattttatgtgaagacatgggagttgcttttgatatttttacttccttgattcaatatgagactgattagagggctttctcttccagcactgaccagagggtagaaagaaaaacgcgaggattctggattctctctttataagcacattgtttatggttatagctcatccaggttgagtttagtgcagtggctcctacagctgatccgtgaactagctgcaacctgaaaatacagattccttcatccctgggagtttgtgactctggagcactggagaaagacccaggactgcatttttaatgggcttctcatgtgatacttacttatacagaaccatttctttggtagtaaaaaggaataccggctttggtctcagaggatttggcgtcaagtcctctctcttcattgaagcaccaaatatttatttaactcctcccatgtgccagaccttggaccaggctctggattgatacaacagtgagcttaatagtcatgctttctacccttcacaagcttacactggagaagaggcaggcattaagtacacaattacagaaataaatcttattcatcaactatgctaagtgctaagaaagaaaatacaaaatgctatgagagagtgttaaaaaagggatctggctttgtttgaaatggggtcaatgattcacttttccctgagataatgactttgaactgagatattatttacgtgacatgagggaaagatgtctgccacccgggcacacgaggtccatttggcttggaacacaaggagagacagagatgaggctgcaaattaaccacttgatatctgtccttctgcagatcaacagccagggtcactgggtgtctagctaacctcctactcaactgcactgaaatttctcccaaatctccaaaacatgtttagtaattctgccagttatatttatcaagagcttaaacaatcagattgttaatagccttttcttaaaaagtgttagaattttagttgttagtgaatgattcttaaaaggctgttctgtctttgggttagggccaattgttcatttactgaaagatatacacggaaaagaaaaggatctgattctgcattgccactacttaagcgctgtgaaatgcttgagcttttgtcaggtgtctgtagcctcatttcatcttcactgtagacttgtggaaatgcattattatgacgccaattgtacagatgcagaagtaaaggctgagagaaatgtagaggttcactgcattgacatagtgaggaattgattgcagtggttggctgtcagggaacagtcaatgtccctagctaggacaattttaatactaccattgtgtcagttttgggccccagttatgcattctcttttggaagacatacaacctggacatacttatgtgaaccccgaaaatctgaggcaggtctcagttagtttagaaagtttatttgccaaggttgaggatgcacgcccatgatgcagcctcaggaggtcctgaagacatgtgcccgaggtgatcagagcacagcttggttttatacattttagggagacatgagacatcaatcatcatatgtaaaatgaacattggtttagtctggaaaggagggacaaatcgaagcagggagtgggcttccaggtcgtagataagagacaaatggttgcatttcaagtttgtgattagcctctccaaaggaggccatcagatatgcgtttatctcagtgagcacaggggtgactttgaacagaatgggaggcaggtttgcctttagcagttcccagcttgacttttccctttagcttgatgattttgggggtccaagatattttccttttctttttttttttttttctgagacagagtcttgctctgtcgctcaggctggagtgcagtggtgcaatctcagatcaccgcaacctctacctcccaggttcaagtgattcttctgcgtcagcctcccatgtagctgggattccaggaacgtgccaccatgcctgactaatttttgtatttttagtagagatggcgtttcaccacgttggccaggctggtcttgaactcctgacctcaggtgatccacctgcctcggcctcccaaagtgctgggattacaggcgtgagcctggcctttccttgcacacttaacatcccaggatcttacttaatgctgggaatgaggttctatggaggactcccggtgttttttctcctgctctccaaagccaaccaagatctcttcagaaatcttcagctcagcccaaaggagaaacttccaaggtaaaagaattttcctaaaagtataaatgatattaagaattctgcccatatggactgggattatgctttatttcctgatgggcctttttcaaaataaatcatgttcctactctccatcttagcagatgatgaaggcaattgctgctgaaatggaaccatgtggtaacccctgcattaaagcaagtgtaggtttattacatacattggacacagtaggtgacaatgtagaattatttattttaagggtacaagaccatttaccttccttcctcaatatccttcttataccttattatagtgctgcactttacactgtaagaatcattccttggaatttgtaaggccctgaatataaaaagccactgttaaaatagcatgctacctaagaaaagtaacccattaacatccattaaggcttaagtgttaattataatcatgaagtttgaaagttatggctaaatgatttattattcagaagccaaagccttctagatttgtttgactccaaggatagagtcaaaagttcaaacgattctaataatgcaaaaatatcaagaaattatggaatcttctcattccacccttcctctttatcttaaactgctactatttcaaaatatatgtgttagtcatgccgattactgtgaggttatcaagggtagtcttcaatatagagcctttactttcttttcagagctttatgggagaactggttgtcttctatgttttcccttgagaattttgcttatctgttgtgtctgtcctaaatgctacagtagttggtctcagactgagctgtgtttttgtacactgtcatggacagtagcatttatgaagcattttttgcatacaattcttgtctttgatagtgattatattttgtattttaataaattatcctgggctgggtgtagtgcctcatgcctgtaatcccagtacgttgggaggccaaggaaggtggatcacttgagcccaggagtttgagaccagttgcagaaaccccatctctacaaaaaatacaaaaattagcagggcgtgatggcacatgcctgtagtcctagctactcaggtgggaggatcacctgagcctggggagatcgaggctacagtgagccaaaagcatgttactgcactgcagcctgggcaacagagtgagaccctgactcaaaaaaaaaaaaaaaattaccttgaatttttctttaaaaaataaaacatatttagaactcaggttttctctcgttgaattctaagtcctattactcagctgagtttttttatggccttgttgaattgtcaacagagacagtggattactgattcatcaagtatatattctctgtagcaggaaaatggaataaggaatgtacttgcatttccacattacctgacaccatcattttaactttattcattaactttattttacggtgtgtgagactcaaaacaaaaatctgccattagttccagtttggctccaaaataaaatattactttgttcattcattttcacatgttgtattaaagtgctgtcactgggctgatgctatgatcctcaccggagggaaatggatggagcacattctatggaggacatagagagaaatctggagcataaggaaaagggccaggctacgttgggttggacatctcagttgatgatacagggtatccaagaagctttagtttcccacgtatggttaggatctaggtacctggatattgaagatataggaagtagaacataagaaataatttttccagttcacagctttgttttgagaaaggctctgagcaagtaaaaaggagcaaatgcttatctgagtagaacttcaacggtatggcttgtgatagccagtctcatgcaggtacgtccttgggatttaacatatacaggctgggttcagtttagaggattctctagcaatttgagaagccaggaaaacctctcaaaccccttagacccagacagaaagaatcaatgagggaatgattcactcaatgaataattaccaactggagtgaaggattctctagtctagtgattctcaatgaataagcattataccatctctgtcagaaatgtatgtatgttaaaatgcagattcctgggccctacctcaggctaactggagcaaaatttctatgaagtggggtctaagaatatgcatattcacagatatgctagaaggttcttattcatatttacagcagacacttatccttggggatatgtcaaaccagccaagtgggaatgaaggtaaaactttgagcctacagcacaaatgggctgagatattttgggtagagcttcttcttatggataaaacaatagtcacatgagtagcaaaaggcttcataaaatattttgacctccacaggtgacataactttcttttgttgtcaactcctgatttattttagagaaattttgtttttaaaagttctctctgatagataaatgtgctgaggcactgagtgtacttttagttcttgcattgggatgtaatctaataaaataaaattccatgcagctatttggatgacatctgtttgaatagcatagtggggcaaatagatttgtgtctatgtatattatttgtgtgttgtattattagcaaatatgatagtgttagcaaatatgatagtattatcagcaaatatgatagcaaatatgatatgatagttgtatgattagcaaatatgtatattatttacgtgttgtattattagcaaatatgatagctttaataataatctaatattaatttatactacttaattttgacaaagaagtagaattgaagtagagatttgatattaaaggcatttatccatctgctttggagtggcaattggtatatagacaatgggctttagattcacataaatgttggtctcaccttttccatttgctcattgtgtgaccttggcatattatttagcttctctgaatctgtgtttttttaactacaaaaagaggacaatagtacattacttctatgatatagaaaatcacggccgggtgtggtggctcacgcctgtaatcccagcactttgggaggccgaggcaggcggatcacaaagtcaggagatggagaccaacctggctaacatggtgaaaccccatctctactaaaaatacaaaaaaaattagccaggtgtggtggcgggtgtctgtagtcccagctactcgggaggctgagacaggagaatggcatgaactcaggaggcagagcttgcagtgagctgggtaccacagcgagactccatctcaaaaaaaaaaaaaaaaaaaaaagaaaatcactttaaggctgatatatatggtggctcacacctgtaataccaacattttgggagcctatggcaggaggcttgcttgagcccaggagtctgaggttgcagtgagctgtgatcgtgccactgcagtgcagtctgggtgacacagtgagactccgtctcaaagagaacaaaagaaagagagaaagagagagagaaagaaaggaagaaagaaaagaaagaaagcaaaaagaaaagaaaagaaataaaaaaagaaaaaagaaagaaaaaagaaaagaaagaaaggaaagaaagaaaaaagaaaagaaagaaagtaaaaggaaagagagaaatgaagaaaatcagtttaatatagtacttggaacatatcaaatgcttacaaaatttagtgcccttcattgcactggagaagagttaggtggcattttgtagctccgtatgctcagatacagtttgtttttgagctgggaatattttagacttcatcttttctttcttagtcctataattttcctttattcataatgcagtcatccctttcccacccatggaaacagtgaaatgtgggaccagccatgctatattattaattttgcaaagcttgctgacagtgacctctccagcagtagcattcactcttttgccttaaaaaatttcccacaaaagctctccactaggcataagcattactcttagtcctcccactgcttcagtgtggcacagtcatcagtaatatgtagatttccactttggctagggtctatttctctgctttgctcagaaggtaccactgacctttctgattagctgagttgcagatgactgagcttgcacataaaagggacagtcagaaaataaatcttccctgtgtctgtctagacagactccaagagtcaggaaaaattctgctgaaagtccataaatcttccatctttcttcctgaaagcatgtacgagaacagttctcctgtcactacgtatgagagcattcctgaatgtgtgggtagggtttttgatgtcaattttttttatatcaactggtaaaactttattttacaagcaacaggaattggatcaaatgattattataatccagaggaaatattttggaaccacagcaaatgccattatacatactgccaatacagatttaatagacaatactgaactgtacaagagttatttatttttccttaatctcgaagctatttttagtaatacaaaaaagccatattaacatttttttcccgttagaaaacatgatgtacaaaactttggatgaaaagataagtcaaatttcgtttaatcacttggaggaaaatccaccaactctctcaataccacctttcactcgcgtccgtgtgaagagaccaccaaacaggcgttgtgtgagcaataaagctgtttatttcacctgggtgcaggcgggcgggctgagtccaaaaagagagtcagcgaagggagataggggtggggccgttttataggatttgggtaggtaaaggaaaaaggggggttgttctctggtgggcaggagtgggggtcacaaggtgctcagtgggggagctttttgagccaggatgagccaggagaaggaatttcacaagacaatgtcatcagttaaggcaggaacaggccattttcacttcttttgtggtggaatgtcatcagttaaggcaggaaccggccatctggatgtgtatgtgcaggtcacaggggatatgatggcttagcttgggctcagaggcctgacgttcctgtcttcttatattaataagaagaataaaacaaaatagtgtcgaagtgttggggcggcgaaacatttttggcagggggtggtatggagagagagaatgggtgatgtttctcaggattaggggaggcgtgggaacctggagtgggagagattaagctgaaggaagattttgtggtaaggggtgatattgtggggttattggaagaaacatttgtcatgtagaattattggtgatggcctggatacggttttatatgaattgaaaaactaaatggaataagagaaggagaaaaccaggtattaaagttctaagaatggggaggacctaggacatgtaattagagagtgcttaaggagatttagcatagttctgccagcaaagattatttatttaagagttaagagtggcagtttggggatagcaccaggagatatcagctgtgatagcttggagaaacagtgtaaactggcagtgtaaacaagagcagggcacgtatgagtagttgagaacagtgaacaggagtatgactagacagaagatagtagggatgacaagtttttttggggcacagtcttaagttggtctggtgtctggaataagactggggcctaataaaaaggagcgtccatacaggagcttaaatgtgctgtaccttgtaggattccgaggacaggcctgaattctgagaagggaaagtggtaaaagtactgtccagttctttttaagttggtggctgagcttggtgaggtgtgtttttaaaagactattagtctgttctaccttttctgaagactgaggaccgtaaggggtataaaggtttcactgaataccaagagcctgaaaagccggtctgctattggactgtatagaggtgggaaggccaaagcgaggaattatgtgtgacagaggggaagaaatgactgcggtgaccttttcagaccctgtgggaaaggcctctacctatccagtgaaagtgtctacctagactaagaggtattttagtttcctgactcagggcatgttgagtaaagctactttcccagtcctgggtgggggcaaatccttgagcttgatgtgtagggaagggagggggcctgaataatccctgaggggtagtagaatagcagatggaacactgagaagttatttccttgaggatagatttctacgatggaaaggaaatgagaggttctaagaggcgggctagtggcttatactatagcatagcctgcctttgctggtgtggtgattaggcctggtggaactgccatcaataaactaagtgtgatcagggtgaggaataggaaagaaggaaatatggggaaatggggtggaatgtcaggtgcatcagagagatacagtcataggggtcaggtgtggtatcaggaataatgtgggaggccggattgaagtccggaccaggaacaatggtaattgtgggagactcaacaaagagtgagtacagctgaaggagctggggagcagaaagtatatgcgtcaggtgtgaggaagaaaatagctggggagcagaaagtatatgcgtcaggtgtgaggaagttatgagaactgttgagagtgagttgagcatagtttgtgattttaagggcctctaaaagtattagggcagtggtggccactgcacgcagacttgagggctaggcaaaacagtaaggtcaagttgtttggataaaaaggctacagggtgtagtcctggttcttgtgtaagaattctaactgcacaggcctgcactttggctgtgggtaatgaaaagggttgggatttgtcagggagagctagggtgggggcagtctctaaagctgtcttcaaggaacggaaagaggaatggggaaaggatttaggatctatggggtcagctaggtttctttttgtgagtttatataatggttttgttaggatagcaaaaccaggtatctaaagtcgaaagtgtctaaccatgcccaggaaggaaaggagttgtcgttttatagctgttggggtttgagatatcagctgaacaggatcagcagggagagcacgtgtgtttttatgagaattacgctgagataggtaacagctgaggaagaaatttgggcttgactgaagtaatgggggctgtctgtgaagcttgcagcagtacagcccaggtaatttgctgagcctgatgggtgtcagggtcagtccaagtgaaagcgaagagaggctgggatgaagggtgcaaaggaatagtaaagaaagcatgtttgagatctagaacagaataatgggttgtggagggaggtattgaggataggagagtatatgggtttggcaccatagggtggataggcaaaataatttggttgataaggtgcagatcctgaactaacctgtaaggcttgtctggttctaggacaggtaaaatggaggaattgtaaggagagtttataggctttaaaaggccatgctgtaacaggtgagtgataacaggctttaatccttttaaagcgtgctgtgggatgggatattggtactgagcggggtaagggtgattaggttttaatgagatggtaaggggtggattataggtcgctaaggagggagtagaggtatcttatacttgtgggttaaggtggggagatataaggggaggatgtgaaggaggctttgaactgggggaaaaggtggcaatgaggtgtgtctgtagcccaggaatagtcagggaagcagataatttagttaaaatatctcggcctaataagggaactgggcaggtggggataactaaaaggattgcttaaaagagtattgtctaagttggcaccagagctggggagttttaagaggtttagaaacctggctgtcaatacaacagttatggaggcaagggaaacaggcctttgaaaagaaggtaatgtggagtgggtagcctccgtattgattaagaaggggatggacttaccttccactgtgagagttacctagagcgtctgtgatggtcttgtaggcttctgaggcaatccggcagtatcagtcttcagctgctaagctgagaagatctgggaaggagtcagagagccttgggccagagttccaggggctctggaagtggctgccaggtgagttgaacagtccgattttcagtggggtcctgcacagatgggacacagcttaggaggaatcttgggctgtgggcattccttggcccagtggccagatttccagagcttgtagcaagctcctgggggaggcaggcctggaggaatgcctggccactgaggtttaggcgtttagaagttcttgtgtgctggagatgtggctggggtttgtctcatagtggaggcaaggaattgcaactcagaaatatgttgctacttggctgcctctactctattattgtacaccttgaaggcgaggttaattaagtcctgttgtggagtttgagggccggaatttaatttttggagttttatttaatgtcgggaggagattgggtaataaaatgtatattgagaataagacggccttttgacctttcagggtctagggctgtaaagcatctcagggttgctgccaaacgagccatgaactgggctgggtttttatatttgatgaaaaagagcctaaacgctatctgatttgggataaagaaaaaggagcattaaccttgactatgcctttagctctagccacctttttaagaggaaattgctgggcaggtgggggaaggctagtcacagaatgaaactggaagccagaccaggtgtgaggaggggaggtgataaaaggattatagggtggaggagcagaggctgaggaagaattgggacttagcctggcgaggaggggagaagtcagatgagtctgtagaaaaggactattagaaagactcagtgacacctggggttgggactgaggggacaggcaggagggaaagaaggaagatttgggactagttgcattgggaacagagactaaggagggattgatgtgtaaaagaatggctggacgtcaggcacctcagaccgtttgcctattttatgacaagaattatttagatcttgtaggatggaaaaattgaaagtgccattttctggctatttggaactaccgtcgaatttgtattggggtcaagcagcattgcagaagaaaataagacgcttagattttaggtcaggcgagagttgaagaggttttaagttcttaagaacacagactaagggagaagaaggaggaatggagggtggaatgttgcctatagtgaaggaggcaagtttaaagagaagggtagagacgtggagtaggggatggggagcagccaaagcaggcatccccgcaattgacttgccaccaagggaacgtgggtgaatgaccaaggcaggtgtccctgcggagatcagacaccaatggaatgtgggtgaataatcagagaggcatccttgcaatgattaaacaccaagggaaggctgccttcccgagtccatgaccggcaccggagttttgggtccgtggataaaatgtgtctcctttgtctctaccagaaagtgaaaggaattgaaattaagagaagggagagattgaagtgtggtgccaagattgaaaggagaaagaggttgagagatagtgagggaggttggagaagagagtaaaaagaggctgcttaccggatttgaaattggtgagatgttccttgggctggtgggtctgaggacccgaggtcataggtggatctttttcacggagcaaagagcaggaggacaggggattgatctcccaagggaggtcccccactccgagtcacggcaccaacaccaaatttcactcgtgtccatgtgaagagaccaccaaacaggctttgtgtgagcaataaagctgtttatttcacctgggtgcaggcgggctgagtccgaaaagagagtcagcgaagggagataggagtggggccgttttataggagttgggtaggtaaaggaaaaaggggggttgttctctggtgggcaggagtgggggggtcacaaggtgctcagcaggggagcttttgagccaggatgagccaggagaaggaatttcacaagacaatgtcatcagttaaggcaggaacaagccattttcatttcttttgtggtggaatgtcatcagttaaggcaggaaccagctatctggatgtgtatgtgcaagtcacaggggatatgatggcttagcttaggctcagaggcctgacaccacccaaagtgttttatgcagtgaataaaatcaaaataatgcatcttaataaattccagctgttaaaagaacaaacttagcaatatataacagtttgctacgcaggatttttgactattcactttgggagttattttttaaaatccacttttttttactgagtcttactacatatcaggcactggacttggccatctaggtaactaagaaaaagttggttaagataggaaagacccataaatcaatcctttgattaccaaatgcaatttttaactttcaaacatccccaagatcaagaaaccctaactaaaaatacatacccttctaagtgttatttgattttattagtagcaagggtgtttggtaaggtcgtgaacctctatttttgatccattattccaattaaaagcatgcgtcaaaagctaatttgttatttttctaatgtgtttaagatttggcattcagtttttacacatgtggttcagtgatttatcatgaaccctaaactgcacactgctcaaaaacagcaacacagatgtgcgttacatgaaataatggtttttgatacatatcttcaaattcaattcagtttagggtccagtgaagaaaaagatatccagttatcgggtggtaaagagcagaggaggtaaactagttaagattattaatatgcagtgaagtgttattgtctatcttatcctttgagtaacaagatgctaacacgctttcaagaaaaaactgcttaaaactatgctaaaggcccatgcattgacatcatccattcaacaccgttactttgttacataaaacggttttcttaaggtgtaacatattaggcaataatttggaaattagccaagcactaagcaattataatagcaggtaatacaccatcaatttttgaaacacatttggccacatttcacaatccatctgcagtatggattctatagactctcactcagtttaaaatttgtttctggacctgaatgacaggagaatggctttatgaaattttctcataagacatttaagtagtcttaggttcacaacccttttgttgtaaatgatttaatctgacatgccatataactacaatacaaataattatgttcaattcttaaatgaaaactaaatgccaataaatggtaacagatttgacatggaatgttctaagatcttcctctacataatctgccatggcagattatgaatttcagagcttgaaaacttcagattaagaaccacaagaaaatttactcttgatggcatacaagatcttcctaaaaattaacctaagacctagaagtctcagtattattagaacataaagaaacgcaacaaatctgtatattttattcacatatatttttgtttttagtgtgctcacagaaaattagaacaccttaagtaggagtttaatagcaatttttgtaagcaaagttacattccatctctaagtcaaattggtcgacgcttctccagcatttacaaaacatgatagacaagatgctacacaaaaccattgcatctgaagattttttttttcctttattctcaaagatgactggaaaagaaagcattatctgctgtaatcaaaaacataccacagtataaacagtaaccattccgcttatcacagcttggttgagtttaaaatttgtgtttaaaaggtccaagatgactgcagttttacaaaaatgggcagggtggaaagtcgcaaacttcatgtgcttctggatatcaagatttgtttttatacaatagtcacagttaaaaacaccctgctggtaatacataattacactttattaaggtcataaaccagcaataaacaatacagcctatataacttgtagttctacttaatcactgactggtacacctaacatgagataagtgaaaagttcctatggtttaaatgaactcctaagactatgatcatttttttttttttaaatatgggtattggtgttttttcttttttcctctttccttcttagtcaagacttgtagtgttgtaaacctgcctcacaaaatacatggtaataacttttcttaaaaaaaaagacagcctttacaccatttctagtggcacattattttggcaatgttatgtaccacttccatttccccattgtgacccctatcacttcatttgatatccctttttgacccacccatctctttcatatatgggcatatccatagattgacaaaggaagtttacatttttggataaagatggagagtatgcaaaaacattaatactgatgcaaaaaaataaaaaaatagaaacaaggcagaggaagaaggtgtttaagctctcctcgacctgttggaatggtggttaacagaatgatttgagatgggatctgtggggaggggagaaaaaaaacaaaattttgtgcttaaaaaaagtaaaagattgatgtcaaatatttgtactaagattgcgggtggcaagagttagcatcctgcagttagaagcaaaattagagatttggactggtcaaggacagcattgatatgtgtggggtatgtaaatcacccaagctctgcaaaagtactgagaataacttgtattttccagactgaaaacctaccatgatggggagggattgaagtgggccctggaacaactccggaatacattacaagcttaaggggagagcaaggaatttagaccatagagctcatcattcatcattttattccacataaaatgggtgtttcagcatgtccaaaagcatagataaggaaattgagcttcccaagaagttaagccagttgtttgcagttagagaaagcatgtttttatgaagctgtcctacccaggagcggggaacaggtccctgggctctatgaccatggaaatctctagatgagtaaaagaaagcttggcaaaaattgggcaggatcctcaaacaaagattgagaaaggcttttctcatctgtgaatcagagttctggactttcctgaggatgagaacagctgcatggctgaaatgcagcagcccagagcaaagagggtgctccctggggggtcacagctggtgaagactgaaaatccagatcctaaaattcaaccagacctatcataccagcaggccaccacgaaatgactgcaggtttcactggagagacgaggtacttggcctgcgaattgctttctatgtcctagacaagtaattgcgagtaagccttgagatagcaatttgatagtctttgatagcaatatgacattgctacatccaagtgtgggagtcagtacacttatattgcgcatatcttggacattttaggtttcattttcatttctttttaccgtcaaactgggggaaagattggcccttcatcccagattgtatttatgctcatttttgttttcacccctgcccatgcccacccaaccacactcctgtccatcctctccctcgctactcatatacccctgggaaaagctcactgcatttagatcccaggttcttctcccccaaggcacatcgcttaacattaatgctgggtgctcacttgatggcaataacatttcttttgaaattttcaagaatatgactcttcaagaagcaacaactagaaataattaaaagttcacatgactgtcagagaaaatatagcagaggcagtagcagtcctcgctgagaaacccagggagcaactggttgggctgagaaggttcgtgaggaatctttcatggagaaaattattttgccaacagttccttgattattatttaatcatacagttggctctcttgtgttcctttaagatctgtgagataggtacaaacaagattttatattcaatagcttatacctgtaagcagtacaggcttttaaaagattggacttttaaggcaaaggtaattggtgtgaagtattagccacttaatggaaaatgataaaatggtacatgtttcaatcagaattatgagctgtgctcgacgtggctgtttgtagctgaagttcactgatttctgtacaatgatgaatttctttgtggcagctaaactgctcagcctagagttacacaatcttcaacgatgacgtttccaccctttgcttgggtcattgaatgtctcaggaagaggcatgaagaagaatgaggagctcgacccacctggagatgggtagacatgtttgctgagctatcagtgaattgacgcatccaaggatgcttttctccctacaggaataatctcccgtcatgtctcaaacttctctccatctcactagtgaggatgaatgctgtcttcctctagggtagtggaggacaatcaggtcactgccagaagacagcttttcacactctcgctttcctcgagagaatgttaaactaattggagtgaggcatgaaaggatgaaatttggccaaattggcaggtgtgaacgtcctttcttcacaccaagtagagtcaactggggaaaatgatggtgctgtcctgatgtgagactgtttctcatagcacggtgctggccactgcatgacactctctaccagcagagaagtggagtgctactgtgaaaagaactgacggatatgatttggttctgggaagtgagttttgtaacaccatgctggaaactaactcattagctgtgatcttgcaaaaattctggcattctgagataaagcaatttgatcaccagtatgtcatataaagaggttttggagtagctttaaaagacacagtagatcaatatgaaaatgaaatgtatccatctaataagaatattcctcttggaggagccagtaaaagtgtgtgttcttgtgcctgcctttgtgtgtgcagacacgtgtgcatatgtgtgtatgtgcagcatacatgtgtgtggtataaagaaagaaaaaaatcttgttgcgtaggaagagttgtgtagagcctactaaaaattatatagccaaggcatgtctcttaattttggaactactaggtgttaaaaagcaaaggaaatgaacatcagagcaagtgaaatatgagagccagaaaatatcaatgtgagttttgatatcaatagaccaatgaattgccaatgatgcagaagagctttatgagccttggcaggcaattaggtaagagtagtttcttctggagtggcaatttgaagtggttattaactatatactgaaatttgacgggctaaagaacccagttaaaaagaaaaccatccatatcgaattgttccctctactttgtttaaaaaacaaaaaacttcatgatgagctgaagtaagagatttttataccaaacaaagatgactaaactgaaagtatgaaaccttctatttttagtgaatcctgacattctctactgctagcattcccagcttccagataatatgttctccagttggctggttattgtgctgtaaatcacatttcactatatcagcaaacgatggcatgaacttgaagagcaaaacaaaatcagcttggaaaaactgacataaaacctctaaagtctaaaggtagtcccttcccttagaaaatgactggattgattacaattgcattgtattatcaaatatgtggttttattttaattttgtttactttttatttgtttactttttgagagataggatctcactatgttgcccaggttggtctcaaactcctggcctcaagtgattcacctgcccttatctcccaaagtgctgaggttacaggtgtgagccatggcactatttttaaagattaaaatatatttaaacaattaaattccaagtgaagaaaaacatagataaagtggaaggtgattaaaaaagcaagtgtttgctgcactctgtttgctgttcttttctctgttagttgctgaatcacacttatgataaattacatttacaattcatttgaaaataaagctaaatatcaagttttgggatattagaaagtagaggctacagagaagtattcttatctaaatcaataggaaaagtagaatttttcccattgctatgtgataacatagcttatcactagccaatttctcactatctgcataagattttgccaatggacagaaatctgcttccttactttctgtgtcaatcaaaaatagtatcctgagatattattttgtgtttcacagactagaaatttttagcaacctgaggacatgtgacttgaaaacatgagcagtgccaagaattatattctcttccagttttcatagctaaagggagttagagttgaacaattcccagaacagcacagaaagctagaaaatattaaatttacaggctaaggctttgccattgaaagctgactatggagatttttagggtaggcaggaagaacaacacaatctagaagtttgggatcttgctatatttccccttcactaagacttttctaagtaaatagttaattaatatcccaggatctcaatttccatatctgtaaagtgaaagatttgaatggataaactataaggtctctttcaaataaaaaattttatccttgtatggcactctccataattacacacatgtataatctaaccctatggaactacacattaatttcccaagtgtgatatttatgatctcttctgatggttgcatgccatttgttaacgtgactttgacctttcctggtctgtgtggcagctgagctactactgctatatcctgaaccagggctttggctaagcagggatgtccaagtgcattccttatgacccagagaggctcataattccatacaggaacattcatgggaccttgaagaatttatgtttgtgttggtaaatttctcttcatggcctccttgagagcaatgaaagaagtgtattttctgacagctccaacttcttactgcctgtgtttgctcagcattatttcagtcataggtgtccggaaccccagaaagtgcaaagacatcctcacagctccatgaatatatgaccaatactcttcagaggggactgaagatggattagcactttgtaggtagaggttcaaatcccaattgcaacagcaggctgtgtaaccttgggaaatttgacctctctcctttgtaagtgggcacaatggataacatgagaccatatttgtaaatcacctgatgcggtatggcaggctcaaggagtgttgtctttgcactgcccttccatgctgtgtttatcctgttatgaataaaatgaattcaacctgttagactgtcagcgccttcataactggccttccctttcggcttgaggcatgccatctgccgtattttgcaccaacttcaagaacataatgtacttacaaaatacttgtcagtgtggactctgaatgaatttttatagcattaaaaacaaaaacagacaatcagagcaaggaacaagaacaagccatttacaacagaataaacacaaatggctaatcaatatatgaaaaattggtccaactttatcctcagagatccacaatttaaaaaaataacagcttcgagataatttacataccatatgattcgcctatttaaagtgtatatacttcaatggtttttagtatgttcacagagttgtgcaaccatcatcattaattttaaaacatatttattacccccataaaaactcatactcattagtggtcattccctttttttttttttttttttttgaggcagagtctcgctctgtcgtccaggctggagtggcaccatctacgctcactgcaagctccgcctcccgggttcacgcccttctcctgcctcagcctcccgagtagctgggactacaggcgcccgccaccacgcccggctaattttgtttttttttttatttttagtagagacggggtttcaccgtgttagccaggttggtcttgatctcctgacctcgtgatccacccgccttggcctcccaaagtgctgggattacaggcctgagccaccgcgcccggctgtggtcattccctttttatcccttaatcctttccttccccttaggtaaccactatctactttctgtctatagattttcctgttctggacatttcatgtacacagaatcctacaatatgttgtcttttgtgattagctagttttgcttagcaaattgtttccaaagtttatccatattctagcacattcactttatgcctttttaaaaaatttggaatttgtttttttattttttaaattcatataagatatatctaacataaaatttgctactttaaccactttaaaatatgcagttcagtggcattaattatgctcataatgtcatgcaaccttcgcggctatttccaaaacgttttcatcaccccaaacagaaactacaaccattaagcaataactttccattcctccttcttcccaggggttgataacctctaatgtcctttctctctctatgtatttgcctgtcttagatatttcatataagtggaatcatacaatatttatccttttgtatctgttttatttcacttagcgtaatgttcaagtttcgaccatgttgtagcatgtatcagaacttcatttcttatgaataaatataccatattttgtttattcatctgttgatgaacacttgggttgttcctaccttttggctactgtaaataatgctgcaatgaacatgggagtgcagatataccttcaccatattgatttcaatttcctctggatatatacccagaagtgggattgatggatcatattgtagttctatttttagttttttgaagaaccttcatattattttttatagtggctgtactaatttatattaccaccaacagtgtataagggttcccttcactttgtatccttgccaacactcatctttcatctttttgatagaagccattctaacagatgcaaggtgatatttcattgtgattttaactagcatttccttaatgatcagtgatgcttagcattttttcatgtatctattggtcatttgtatgtcttttttttttttttttagaagtgtctgttcaagtcctttgtccatttttaaatcaggttgttttcctttcattgaggtgtttgagttccctatatattttaggtattaactccttatcagagatatggcttgcaaatattttctcccattctgcaagatctacggcttcaatgcaatcccattaaaattctttcattttctgcagaaatagaaaaaacaatctttaaatttgtatggaaccacagaagactccaaatagccaaagcaatcttgagcaaaaagagcaaagctggaggcatcacacttcctgatttcaaaatattttaaagtgattttaatcaatagatagtactggcataaaaacagacaccagtgaaataggatagaaaacccagaagtaaacccacatactcacaattgattttcaacaacagtgtcaaaacataacattgggaaagggcagtttcttcaataaatattattgggaaaactggttaaccacaggcagaagaatgaaattggatctgtatttcacactgtttacaaaaattgactcagaataattaaagagttaaatataaaatctgtctttttgattaaagccatcctagtgagtgttaagtagtatctcattgtggtctgatttgcatttccctgatggctaatgatgttgaatatcttttcatgtgtttattggccatttgtatattcttaaactgttagtggaagtgcaaattaactttaaaaagccactcactttggaggacagtttggcaatttcattcattttgagccaacaaacccatttgtgggaatttaccttaagaagataattacagaactatgaaatgatgtgtgctcaagttattgcagccttcttttacaataaagaatcggaaacatactctgtagaagttttaaaaaatagtaattttctgatatacacaaaatgatgtactatgcagccattaaaatgatggtatggaaataagtacttcacacgtaaaatacctataatatacaagtcaaggattccttatccaaaatgcatgggatcagaagtgttttggatttggaattttttaagattttggaatatttgcatatacataatgagacttcttagggatggtacccaagttcaagcatgacatttatttatgtatcatatataccttatatccatagcctgaagttaatcttatacaactttttctttcttttttttttttgaaacggagtctcgctctgtcacccaggctggagttcagtgctgcattaagctcactgcaacctccgcttcccaggttcaaaactctcctgcctcagattcctgagtagctgggattacaggtgcacgccaccaggcccagctaatttttgtatttttagtagacatggagtttcaccatgttggccatgctggtcttgaactcctgacctcaagtgatccacccaccttggcctcccaaagtgctgggattacaggcgtgagccatggcgcctggcctatacaatattttaaataactttgtgaatgaaacaaagtttatgcacatttagccatcaaaaagcaaaggtgtcactatctcagccacccacgtggacaacctgtggttgtttggcatcaccatcatgcctgactgaatttatatgccaccaatgaacaattattttcttactcttatttatacatgagtctctaatagtaaagacaatgacataccatcaatacagtgaaaaaatactgtgttcagcatagctaagcagaacagtagcatcaccagaatatctgtatcagctgttaaacaatagcagcaatgaacaacgacaggctttcagtccccacttgtgacctgttacgtcaggtcagatgtggaattgcccgcttgtgacatcatgtagttgctcaaaacgttttgaattttggagcattttggatttcagattttcagtttaaggatgctcagcctgttctgttgaataaatagtgtgtcacagagtagcatgccattttaccttttgtcttttaccactttcgtgaaaacgttcgccttcttctctttgtatttgtgtacataaggagatgtacagcggatgactggtaaaagtgaacagtgtttacctctaggtgctggaatttgggatagcattttgtttttcctttgagattttctctgctgttagaactaaagtaattcagcctatatcaaaacaacaataataaagttactttcaaaggaagaataattttgctctgaactgtgcctaccactatctccccttactattgaggaccacaccattttgaccctgaatttctactttcaaaccacaagagaatcccaataaactatagtaacatggagaactggtgtaagaaaaacacaggagcttgttttcattgaatttccttgcaataattacacgagtttaattaaaacaaataaattagaattgatacactggaatcaatatgcaaaaaacaaaatgtgcttgttttacgggtcctaataggattccaagcaggaaccattttctagcatttatttctagcacatctatctttgaatggaaatttgtgggagatgatgagagaaatctaaacatttcccattttggtgcttatcatcagcccagaaggtttagttcatccagtcttgttcagaattgttcatgctctgtcatgcctgtgctcattgatgtggttggctccgtgtccccacctaaatctcatctccagttgcaattcccatgtgtcaggggatggggcctcgtgggaggtgattgaatcgtgggggtggacttcccccttgctgttcttgtgagagtgcgtgagttctcatgagatctggttgtttgaaagtatgtggcactcctccccttgctctctctctcttgctgtcagaggtgattgaaccagaacaactccattttgagtaggggctgggtaaagtaaggctgagacctactgggctgcattctcagacagctggttaagctttctaagtcacaggatgagatgggcggttggcacaagatacaagtcataaagtccttgctgataaaacagattgcagtaaagaagctggccaaaacccaccataacaaagaaggccacatgagtgacctctggtcattctcactactcattatatgctaattataatgcattagcaagccaagagacgttcccaccagcaccatgagagtttacaaatgccatggcaatgtcaggaagctaccttatatggtctaaaaaggggaggagtactcagttctaggaattgcccatccctttcccagaaaactcatgaataattcaccccttgtttagcatataatcaagaaataatcataaaaatgggcaaccagcagccctggagtaaccattcttttattacttgacattcttagtgaacttgctctcactttactctatggattcaccttgaatattttcttgcccaaatccaagagccctctcttggggtctggatctggacccctttccagtaacactgccaccacatgaagaaggtgcttgcttccccttcgccttccatcatgattttaagtttcctgaggcctcccagtcatgcttcccattaaacctgcagaactatgagtcaaacctcttttcttcataaatttttatagcagtgtgaaaacaaactaatatacccaggctgttccacatctggctaaaaagaccctctgcaccttgaattgctagacaaatcccattgttctaccaagactggctttgattcacatctatgctcccaatactgtgtaaaaactgcctggagatctgtttcttgcttatctatcttcacatctccagagctctgtgcctggaatactgtgagcactgtgcctggaatattggcagcactcaataaatgtttgttgagtaaatgcatgcatgtgtgcatgcaggcagtggtcagattgtaaaaggctttataagccttttacatgctaaaagggaatgctaaagaaagggaaatcaggccaggtgcggtggctcacacctgtaatcccagcactttgggaggccgaggcaggtggatggcctgaggtcaggaattcaagaccagcctggccaacatagtgaaaccccatctctactaaaaatacaaaagattagctgggtgtggtggtaggtacctgtaatcccagctactagggaggctgaggcaggagaatctcttgaaccttgaaggcggaggttgcagtgagccaagatcgtgccattgcactccagcttgggcaacaagagtgaaactccatctcagaaaacaagaagcggaaatcagagtcagtcacaggagtagggtcctatgttgccttagaggtagtgtggctgctttcttgatgtcctctccttactcgtacctgcccagtcttgtagctttcagtatgatccacaaattcaacacacacatacccccaccacgcccaacatacacacatatacatacataaatacacaaacaacagaaaagaaaatgtcaccacatatttcacatgaccttagttctttgtttaaatgaaaaaaaatctcataattttttctcactgaaaaatgaatatatagtcaatgtacactagactatagaaaaaagtacaaagaagaaacatcacttgatatcccattatctacagatgaatggttagagttttgctgtcttttctatataggcatatatatttacatatatatgcatatatttaagtggctgataagacaaaaaataaaacaattaaaggagatgttcttttttcttgggaatatcagttgaacagactgtacattttgtcttttgtaaatttaaggctagctagaaactcttacacttgggaaaaagaagtattcacagatctttgtgtttttgtgtggcttttactccccttttactaatagaattttttttttttaaatcaagagtaaacatgaatgaagggttatagattttggaaagacataacagaaagcagctgcctcatgcaccctctctcttcacttctaatcctgttcaccaaagctaaggacattcaaccatttgcactttttttcatatgtatctccttatttttaaaggacatgcctatattgctattctggatttttcatttttagtagttatctattcttaccatggaagatgaagatttcattctcttacatgccccctccccactcttccaacccatgttccttccttatgctccaaatactgttcatcatcatttttgttcagagtagactgttgaagacattgtttcaataatcttctcattttatttacagttaagctatgtgtcatttaatttttcttgtagaacattttgtttttcctggagtttataattgtgttattttttagtttgtttgtaagtatgtttatttagatactgagaaaaaaatttactcgaattttaccagtgccaatacctggtttagggtagaatatttttgaaaatgacctacaattcctagtaaattgcttgagcaattttctggtagaatttaacaagatgaagagcccactttagaggttggatttatctgcccagctaactgtcgtcagccttatgatgagcttcataaactttagccagactttattatacctagtctaacaaagtcacctagccagctttctttctctttaaatgtctctaccagagaaatcttgactggctttatcagaagcctttgctcttgcagcaagtttgacataaaatattgacactaaccagtaaccaattcgcttggaaagttccttcagctatgttcatcattaattcttccacttagtttccccaagaagtggaaatggcctcccaataccttaaaacacattgggtaatctctacatttcattctttccttgaagacatccttcttggagcatgctattttctggctgcattgtaggttgatgagtctctagacttgctgcacagagatcgtcatggggacttcttttgccatcttcctgggaattccctttcccctctcctagattggatgaagagttggtctcatgggggtctgtgaccgttgcaatcgcacttaccagggctctgcatttggcttagcactctgctgttgccattttgaaattcttaatagctgggcacggtggctcacacctgtaatcccagcactttgggaggccaaggctggcagatcacttgaggccaagagtttgaaaccatcctggccaacatggtgaaaccccatctctactaacaaaacaaaaattagccaggtgtggtggcaacgcacctgtaatcccagctactccagagactgaggcactagaatctcttgaatccaggaggcggaggttgcggtgagctgagatcgtgccactgcactctaggcctgggcgacagagcaagactttgtctcaaaaaaaaaaaaaaaaaaaaagaaattcttaataagttctgaacaaggggccctgtgttttcattttgcactgggtcccgcaaattatatagttgctccttattggactcccaggtttctgtcttttggtttttttttggcaactctctctttttgggggagcacctactctagcagcttcctaagtaatgctgtataagagataagagtttttgaaattttgcatgtctgaaaaaaaatctttatcttaccctcatattcttttttttttttttttttttactttaagttctgggatacatgtgctgaacgtgcaggtttgttacatgggtatacatgtgccacggtggtttgctgcacccatcaactcatcatccaggctttaagccccatatgcattaagtatttgtcctaatgctctccctcccctgtccctaccccctgacaggcccctgtgtgtgatgttcccctccctgtgcccatgtgttctcattgttcaactcccacctatgagtgagaacatgtagtgtttggctttctgttcctgtgttagtttgctgaggatgatatcttacccttatgttctaataatagtatggttcagtatagaattcccaggtggaaattattttccttgagggtttgtttttgtttttgtttttttttgagacaaagtctcatactgttgcccaggctggagtgcagtggagtgatctcggctcactgcaacctccgcatcccaggtttccttgagggtttgaaggcattgcttcattgtcttctgatgtccagtgcttctgttaagaaaacagatgccctttgattcccgacctgtggatacgatctgtattttctctcagttgcagctttgccatctactttctggcaatcaagcttgattgctgttgtcttgtctcatctccttgtttttgcaggtgattatttaaaagtcaccattttagcagtattttgagagagagcagatgtaaacacacattttcaatccgagccacttttaaatgtctgtgttgcttataaagtcagctctttctcttcgtatgtagaatcaggtggtaatggtggggataatttgcataagaagccttagtgccttctggaagacacgaatctttcttttcaaaatttggtggcacatgcttgtaatcccagctacttgggaggctgaggcaggagcattgcttgaacccgggagatggaggttgcagtgagccaagatggtgccgctgcactttaacctgagccacagagcaacactctatctcaaaaaaaaaaaaaagagagaaaattcaatgttaaggaaacctttgctcctgatgagaaagaacacgaaaaactgcagggaaaaattcactattagaaggaagtagactgtattggtaacctagttgtgcctgctggatcaaagtttggctacatgagattgaacaaaagaaccatctccttgttacccaaggagatgtatcatgccaaatctattgtttttgttttgttttcttcaaattattttttccttaataacctggcagtgattcaaaatatgaaaagaagattcagatgtgttctctttaagggggattcgaccatgactgccttacataagcaggatcaaagtccatcatgggactggattccagagaacaatgatggtaagaaggcttcagggctcacagtttgaagagtgttgttacagaaattctctgaggggtagcaggtgcagaagagtcataaaatttaagggaccaaccatggataggctgttgccaggtcatgagcaccttgaagcatctcttgatggccattcattagcctaagtatttgttgtctgggagaactgagcaagatgagctgcacagttcagttgtccatagggtcatgtttcttcagcacagagacctggtctccctgatcattgtgggttatggaaaaacgtgaccacacttaaggcagaagtttcaattccctctgcaatttttcctgcagcactacctgcctaaacacttcacatatatgtcaattcccttccagattctctattgttgaacacgaatgtgtgtggttttaaactattatgaataatgccatcaatatcccaaatcacatatttttgcatattcttcattttttccccatgcacattttacatattgtgttttgccagcatacctccagaaaagttgcttcttcctcagacttagtgtaattttacttaattttttttaaaacacagcaaatataacaaatggaagaaatgacagggtcatttcagcctctttttatttgaatatctgtatttcttaaggttcattttcatctttgatagaattggaatgcatttacaacatgattataatatctgattattaataaatcagaaataaggatgtattttttgttatcactgagatttcaccttcatgtagctctgtacccacttctaagtatattttacaagcatttctctaagaattccaaccatgtgaaagtactctggcaataaaattttaaaagcctctgtttgcactttgtactttttaaaggtaagagaaatttgaggcacaggtgggcagccgagcccttgagagaaagcaacaatagcaccaggtttatcaccgttcaggtaaatgttagaatgtggaatgcttttattatccctgacatagagatccttccagtgtatttagactgaggggtagttttattgtgccaactgtcaaaaggtattgacttcaatgtatgtgggaaaagattggactccagaggcaccgtgattttccttgctctcctggatggtgctgcacagcccacgggggctctggcggctgcatacatgtgcagtaagtgcacctgaaaagaatacatgtgctcaggtgtgtattctgccatccaaatttgctgtacaagctcccttgaagttgactattgatttgctgccaaatgcaagggcaagagacttaatgaacagttggcaacatttatgccaaattatctttaatttttttaagggactatatctttttcaagtagtctggcagtgaacttcagcttcactcattctctcaccctcctcaatatccagttagttatttggcctggcaattcaacttccaaaaatccctctcaattcagtatctcctttccatcctgagctaccgctgctcatgttctagctcatgaatttaatcccaacactaatgaggctccctgcttactggatcttcctttcttaataactcatcactctaaatccattaggtcattgttcttaagaatcttaatggagaaaatattcacaagaggttaacgtaatgcaaaagatggtgaaacgctctggaataaggatggaagcttaatgggaaacaaataccccatcctatttttgcatgtcctctgatctcctgctggggccacccactgccaaaaacaaccaaaagttagagggcaagcaaaagagcatgggtgataccatctatctacaacagttagcttcttagggtacagactaggtggagagataccatggtggggaaaacgacatgtggacgccattcagcacagttactttttctgactctcccaagaagaacgcattttcccctcattgatattccaagagaaatatcattttattggtacctcaactgaggcacctgtgatactatatttgtaaattatttccatgtttagaccttagctccttcagttaagaactatatcttaattatgttcatatctttagcagttagcactatcttgcagacagtggtgcccaatatatgtttgctaaataaaagaacaaatgatggcatagttgtcctggtgtctttaaagaaaataatggctataaagaaatcctttacacctgtaatcccagcactttggcaggccaaggtgggtggatcatgaggtcaagagatgaaggccatcctggccaacatggtgaaaccccatctctactaaaaatacaaaaattagccaggcgtggtggcgggtgcctgtagtcccagctactcaggaggctgaggcaggagaattgcttgaacccgggaggtggaggaggcagtgagctgagatcacgccagtgcattccagcctggggacagagcgagactctgtctcaaaaaaaaaaaaaaaaaaaaaatcaggttagctggagtcagggattaggtaatacggaatgcagaaatagtgttttcttacttagatcatgagcataaaagcactttgtgagatataatgctattcaaatattactagcatcatttccattattctggattgaacataagaaggaacaaaagagaaacaacaaatagcagtcaatagggagaatgttaaatcctttggtaatacctattacatggagaaagttaaaacagacaaacaaaggtccttattcagctaggaatggtggccagatcagggtcattgaagtctagtttcttttctaaccctgacttgctttgcagtatttggtaaatcacttaacctttctgcggtacagtttttccaatccgttaagtgtctattatagtactttctccttactctcgtgcaaggatgtttgggtgattcatttgataatcctgtaaagtactttgagtcccatagagaaagccagggacacaagattttaactgggattattagttagaaagtctttttgccttggttgaatctccgtttttcatttgtagctcacctgcttttctgtggctttcccagttccatccttgttcctgtacacaactgtgagggtgtaatgataaccaattatatatcccaaatgatggggctatcattagattaactagttgggtagatgtagaaaaattagaaaagtgagaagattttcagcttgtctgcagatgactaaggaaaacacttagagtgggtgcagtggagaaagattattagccagtgactgaaatcaattaggaacctaaccaaaatgttgttatgttcgttggcacttgaccatgacctttttgccttcctaaggaaaaataataactggctccaggtttaaagaagcttcatagtttacattgcttgatacattaaattttgaatacgttttgatattggtccagttttacaatttccttcgaatgacagaacctttacggaggacaatattagcacctctttatggagcaactgaaaaactgcaataatatctccaccatatacttttggaggattgagaaaatgtgtcatcgcttggaattcctaatcttattttattcattcaggttgaggaataatgtaagatattgctccactgtggctttatgaaattttttacttaaaaaaatccaaagcatgtaagtatttatctcatggcttaaatgttcatcactgtaaggagaagtttaagattggaatgtatctctagccttgctctctctccccctgagatctggctttatactttacagcagtaggtttgcaaatcaaaatgccagcttgacctagctgccagaaagtcctgaatatgaatcccacaacagaatttattaattttcctttacaagttggtaatttcttattttctcttaagtaatgctaatttcgggtacacccttgccatgagggaggttctaggtctccagtgttattgtcatacactggcatgtatactgtcatctctactggtattatataatgttgttgctggtacaggctttccccagaatttatagagatggagacaacacgaactaggcatcatcagtcacagcaactcagtttatagttattgaaggaattgttgaaggaactcctgagtcagtctgtaagtgaaatcacagacatgtaaaataaacacttacattttagattatatgatgatgctaaattttctttaagacattggagaattaatgtgggggcaaagaacagggcatgacaggagaaagggccaactgggtccctctccatttacaatgagtattatctattttatatttaatttttatcttttctatgaggcatagttttattaatttcagttatacaccataggcaaaaaaatgttcccagttagagatcctgccaagcatctctaatcaatgttgaagccctggtggaattaagttggttgctttgctttttaatttttttaaaaaaataaatagggtatatgggcttgttgtaaaataattcaaacagcaaaattgcaaagtagatgtcatctgatgtcatagctgttcttcccctagccatgcagtttcactgcttttgaaactccagcccccttttcctaggctagctctgttgggagcctttcagaaatcttttctctgtatacacacacgcatgtgtatgttatgtacatatgtatcaatcatgtctttatttatatcgctgctttatttcagtcaggctgctataacaaaatgccacagattgtagcttaaacaatagaaatggatttctcacagttctggaggctggggagtccaagatcaaggtgctggcagatttggtgtctgctgagggcctgcttccttcatagatatctgttttcttgctgtgtccacacatggtggcaggaagggcaaaaaggctctctgaggtctattttatcagggtgttaatcccacgtgctttgccctcatcacttaaacacctcccaaagctccacctcttaatatcatgattttgggagttaggtttcaacgtatgaatttgggaggacataaacattcagaccatagcaatcacattatacatattgcatgtcaaaccttatatatataagatatatctttttaatttgacaaaaaaggatcactttccaggtactattctgtaatctaccttttgtgctttattatacatcgtcatcatatttctgcttcagtgtgataaatctattgtatttaccctaatggctacaaagtattgtcctgagagatatcctaatttatttttttaaatgattcccaattgactggccttaagttgcttctattttcatagaagcaataattatcataatgctacaataaacattattgtacatataacatttttgcatttggggagagtatgtatattgcaggagaaattcttagaaatggaatttctgggcatatgaattttcaaaaatattgccaaattaaaaaggactgcatatatttactctcccactagcactgtgggaaagccttttttttttttttttttttttttttttgagacagagtttcactctgtcacccagactggagtgcagtagtgccatgtcggcttactgcaacctccgcctcctaggctcaagcgattcttctgcctcagcctccggagtagctgggattacaggtgcaccactactacccagctaatttttgtatttttagtagagatggggtttcaccatgttggcgaggctggtcttgaactcctgacctcaagtgatccacctgcctcggccttccaaagtgctgggattataggcgtgagccactgcactgtgcccggaaaatcttttttattcatgtctttactaccattggtcagctaagccagaagacagatgacagagggctggtctatttttgaatattgacagagaagaatgagactctgggctgggcgcggtggcccatgcttgtaatcccagcactttgggagcccaaggtgggcagatcacctgaggccaggagttcgagagcagcctggccaacatggtgaaatcccatctctactaaaaatacaaaaattagctgggtgtggtgatgtgcacctgtagtcccagctactcaggaggctgaggcaggaaaatcgcttgaaccctggaggcagaggttgtagtgagctgagatcatgccgctgcactccagcctgggcaacagagtgagactcggtctcaaaaaaaaaaaaaaaaaatgagactgatcaatgttgctttgacttcaatttactactaaaacagctagcaagaaagggaaagggtactcgctagaccagtgggtctcaacacctggagcagcagcagtagcaccacctgaaacttactagaaatgcaagttctcaagtcccatcttaaatctgaatcagaaactctggtggcagggcccaggaatctgggtttaacaagatcttgagctgattttgatggtggcccaagttggagaattactgcagtacagcttgatgaaagtgagaatgcagtttcccagtgctttccttatgcctcttggaggtgaacctggagtcctctgctttaggttgaaggtacccagggctttgtactccctgcatctcaccccactggggtggagcaggggacccactgggattcagtgtattacttactttcatataaggcaactcttgttgtcccatagttataaagctctgtgttctgtttcttattgtattacgtgtacgtggacatgccaaacattaacaaatatttggcttcttgtctatctgaaaaatggcccctcatttctatttaacatgaatttctttaattataagtgaagttgagcatcttcttatttttatgggccactttgcacgttttcctcttatttattactttctatatttgtcatattttctattggttggttgtctttttaaaaaagaattaaattgtaacagctgttttaattctaaggaaattagcctttcatcatttgtgttgcaaattcgtttttacctactttgtcatctatcatttaaatttagttacaatacatttttgcatcacagagagttaagatttttatgtagtcaaattgataagtttttatgtgtctgaattttgaattttatgtatgcttagatagatcttcccaaccctaggataattaaaaaaacatattttttcctaaactttatggctttatttttagcatatacatctttgatgtgaatggaatttattgtgacttaacaactgaagtatacatattaacttccatttccaatggaatatcattgattgagattataattaacttatagctcaataaaaaaagagttttaacccagagttttcctaaccaagaacagagtatacctttacagttacttattttttcatttttttttccttcgggagtgatttaaaggttctttatatagttattacatatgtattttataaacttttggaatgtgatgtttcttattataagtaacctttctactaattatttgcatataataaagctcaattttttttgtgtattgatttcataatcaccttactgaattctcatattatttttattagtatagtttttagaggattcttaggagttttccaaggcgatgtggtttggatctctgtccccacccaaatctcatgtttaattgtaatttccaactgttcattgcttgtaatccccagtgctggaggtgggcctggtgggaggtgatattggatcatgggggctgatttcctccttgatgctgcttgatcatgagtgagtgctcatgagatctggttgtttaaaagtgtataatgcctcccctctctctctcttcctcctgcttcagccgtatgagcataactgcttcagctttgccttttgccatgagtaaaagctctctgaggtctctccagctatgcttcctttaaaacctgcagaactgtaagctaattcaacctcttttcttcataaattacccagtctctggcatttctttatagcaatgggagaagagactaatacacaaggttgtaataattatctatgaataatataaagcagcctgtttttgaaattagacttctgttatggagtgaatattatggtggaatatgacctttctaaaatttttctgttcttaaaaacatcatcttgggctgggtggtggctcatgcctgtaatcccggcactttgggaggcctaggcgggtggatcacaaggtcaagagaccgagaccatcctggctaacacggtgaaaccctgtctctattaaaatacaaaaaaattagctgggcatggtggtgggcacctgtagtcccagctactctggaggctgaggcaggagaacggcgtgaagcttgcagtgagccgagattgcgccactgcaccccagcctgggtgacagagtgagactccgtctcaaaaaaaaaacaaaaccatatcatctttaatgaagtaaatgtcatacaacaaaattgaccaattttacatttgtaattctgttttaatcatgtagtacagctgtataattaccacaatcatcatataaaacatatcaatcctgccagaaaattctctcctactcctttcctgtcaattgcttctccctatctcttgttcctggtaccactaaataacttttggtcattgtagttttaccctatctagaattttatataaatagactcatacggtgtgcagtcttttgtgtctcacttttttcacataatatatcatgatatggctatacaataatttgtttatattcactagttgatgaacatttgggttgtttacaactttttggctattaatgaataaagaggctattcatgtacattcaagtacatgtcttgtctgggtgtgtgttattatttctcttgggtaaatacttaggagtgagcctgctgagttgtatggtaagagtatatttaacttgggccgggtgtggtggctcacgcctgtaattccagcactttgggaggccgaggcgggtggatcacgaggtcaagagatcgataccatcctggccaacatggtaaaaccccatctctactaaaaacacaaaaattagctgggcatggtggcgtgcgcctgtagtcccagctactcaggaggctgaggcaggagaatagcttgaacctgggaggcggaggttgctgtgagctccattgtgccactgcactccagcctggtgacagagcaagactccatctcaaaaaaaaaaaaaaaaaaaagtatatttaacttaataagaaactgacaaacactttgtatgactctaccattttgtattgccatcagcattatatgagtattccagttgcttcacattttcaccagcattttgtattgctatctgctgaatgtgtccccaaaagtcacgtgttggaaactgaatgcccagtgcaatagtattgggaggtatggtctttgagaggtgactgagtcatgaggactcttctttcaagaatggattaggtctcttataaacagggcttacagaagtgggttcattctccttcattcttctaccatgtgaggacacagtgttccttctctctggaggatacaacattcaaggtaccaccttgaaagcaaagaccagactcttactagacaaggaacctgccagcaccttagtcttgaacttcccagttcccagaactgtgagaaaataaatttctgttattcatacatcaccgtttcaggtatttttattatagcaacacaaaaccaagatgggtattgtcttttaaaaaaaattctagtgagtgttttgtagtatctcagtgtgtttttaattttcattaccttaatgaccgatgttgctgagcatctttgcatgtacttacttatcatttatagatattatttgatgaagtgtttgcttgaatttttttgtctaatttttattggtttgtcttactgagttgtaaaaattctttatatattcttgaagcagatcctttatcagctatatgttttgcaaatgttttctcccagtctctgtgacttgcctttttattttttaaatgatactttttgaaaagcaagcttttaaatattttgaaatccagttcgtaaatttgttgcttttatagtttatgctttttaaagaaattgagtgtaacccaaggtaacaaaaatttctcctgtgttttattccagaaattttagttttaacccttacagttaggtctgtgttcctttctgagttaaattttggatatagtgtgaagatgaggattaaagttctctctcttcttttggtatataaatatccaatttcccagcactatttgttgaaaatggtatcctttccagagtgaaatacactggcacctttgttgggaatcaatgagccatataagtgtaggtctatttctagattcactattctgttccattgattcacacgtcaataccagatgtcttgattacttgagcattataataagtctaggtgtaagttttatagtaagcctgagtgtaagacttctgactttatttttctttttcaaaagactttcaactttactttttcttttattttggctatgctagttggttttcatttctatgtaagttttagaattttcttgtaatttctgtggaaaacactgctgggattttggaattctgttgaatctatagatcagtttggggagaattgatattttaataattttgaatcttttgatttatgaccacaatatatattttcattatccagatgtctttaatttctttcagtaatgtttagtaattttctgtctacatgttttacaaatattttgttaaatttattcctctgtttttcatatttttactatatttttatgatatttgtttaaaatttccaactgttcactgcttatatatgaaaatgctactgatatgttgactttgaatcttgtgaccttgcagttagttctagtagatgttttgaagatttcttagaattttctacatagacaataatgtctgtgaataaagatagttttatttatttatttatttatttatttttaaaattttttggaggccttgtggatttgaagagttttttttctttccagtcttatacctttttagtttttttaaaatttttcctgccttatattgtattgataagaacgttcatacaatgttgaataggagtgatgagagagaccatccttgccttgttcctgaccttagagtaaaagcattcagtgttttgcccttaagcaggatactgtttttagttttctcatacttttttttttgaaatggagtctcgctctgtcacccaggctggagtgtagtggcatgatctccactcactgcaacatctgcctccccagttcaagcgattcccctgcctcagcctcccgagtagctgggaccacaggcgcccgccactatgccaggctaatttttgtattttttattagagacggggttttgccgtcttggccaggctggtctcgaacacctgaccttgtgatctgcccatctcggcctcccaaagtgctgggattacaggcatgagccactgcacccggcccctatagatgccttttattggattgaagagcttttattttattcctagtttgctgcaaatttttttttttattattacaaatgggtgttgaattttgtgaaaacttttttctgcatccattgagatgatcatatggtaagttccattttagacaattgatatgatgactcattgtttttctaaggttaaactaacttcacattactaggataaaccacactggattatgatgtattattcttttaatatatttcaactgactgaagtattgttaacatttttatatctatgtttataagggatattagtctttagttttctttcttataatttcattacctttggataagttaaaaacatttcagtcgtattttagtttttccactcattacatttaagactttaaataaacatacactttaaactctatttctatatatatcaactttaaataatatattctggagttttaattttaggtaggatggagtaagcacactcctccatctctgagtgcacactcctccatctcttagtacacactgaatacagctaactcattaaatatagctttaaaacctgggtataatgcgtataacagtgatataaggacactggaaagtaaacagtagcaagaagattgggaagaagaccagaatttaaagttttatgaaatgccagttagtttatctttttttttttttttgtaccactatcccttggcatggattcaaggtagtctgaaactcaaaacctgtacatagacatggcatggataaggaacaaattacagacagagctccagaagaggccctatagttttgacttaagcagtatgaagcagggctgggggtgggaggcatcacttaatctccagagacagtgagggcaatccatcatttttattttctttttctctatgtttccttgtaccatagtccccaggcaatgctgtggcaatgacagcagtggcctactggacctgcaaggggctaaaagtctgagctgggggggtcccttcctcttcatttggagaagactgatctcaacagagtgatatgaacactcattgattttttttccctctttttatcctcccaccaagtggcctcatatgtaggacaattgttggaagagcatggtagagcaggataattgaagccccagctctttgtccagaggactgaaagggtagccccaggaaactgaagagtatcagcaagatgtggtgagaaaggacctcagggaaatgactccctgaaagtagcttatgaactctcaggcttgctccttagatacccacttacagatctgattctaaacaacatatcaacgactttgaggtctgagctaaggaatagatcatcacttaatttccatattggccaccgggtgacataaacaggagacagatcagaatagcactacaaatgctttgagggaagaaaacaaacccaaaccgatattgaaactacaacccaggaaaagtcagttggaatttgtggcctgaatctaactgggtcagctgctgaaacaaaacaaaaatatcagcattctccatgggatttaaataagacccagagtcttatattattcaaatgtctgtgatatgatctaaagtaacttggcatcttaagaataagaagaatctcaactcttatgggaaaagatagtcaacagaagccaacgcggagatgacacacaggttaaaattttctgacaaggtctttaaaagaagaaagggtgaatacatttgaaatgagttgaatgaaagataattttagcaaataaatagaagacttaaagaacatccaaatagaaattttaaactgaaaaacataacaatcaaaataaaaacctctccagatggtttcaatagcagaatggagatggcagtggaaagggtgaattctaagaaaaatagaaattatacaactgagagaaaaaagatgaaaaagaaaacaaacagagacttagggatctatggaactctaccacaatgtctaatacttctgtcatcagagtcacagagggaggagaaatattgttgtatagaaaaaatatttgaagaaaaatgtttataagtcctcaaattgggcagaatttctatgtagctcctatagattcatggaacgcagggaaacccagacaagataatcctaaagaaacatgtttaggcatatcaaaagcaaactgttaaaaattaaagacaaagaaaaaaaagcttgcaggcagctagagaagcacaactcattacttataactgaactatgattctaatgactacacatctctcatagaaaccatgactgtcagaagaaagtgaagcaatatttttaatgtgctgagagaaaaaagtgtcaacctagaactctatatacactgaaaatatccttcagaaatgaaggtaaaatagagaccacagatgaaaaaaaactagaaaataattcattgccagtagacctgctctgaaagaattgctaaagtaggtttttcagacagaagaaaaaatgataccagaaggaaacttggaacattaggaataaataatatcttttaactctgatatgaatggttaggaaattggcacatacatcctcctttctgatatctttttttttttctgccagtgtccattttttcttagctatactcttatttatacatttcaatgtctataaatttgcacaattgtcaagccttacttctatgttttaatcaattcagtgcaaacaatacttttatgccatgaattcttcctttctcaagttcttttgatgacagcacttgtttggtgagaatttgttatcaagaggttttatatcccttaagaaggtctgtctataatcttttgactcacaattttggatactaaatgttggtatgaagaaatctgaggtcactctgattttcctcccatgcaaatgaattgctttttctgagtgaatgctcattcagcttttatttttattcttaaaggtaaacagcatcaccagaatatatcaagttgattactggaatgaattactttttcctggaacatgatgaatccttttcatcctcagacccagatgttcctttatttcagaaacattttcttctatttaatttttaaatattattttctgattgatttgcttgactcccagggttagtcaagtttatgccaactttatttggtctctcttacatatctatcttttaaattacttttgcttctttgttttttgcatttaagttttcagattttttttttcttcttttctgagacggagtctcgctctgtcgctcaggctggagtgcagtggcgcgatctcagctcactgcaagctccgcctcccgggttcacgccattctcctgcctcagcctcccgagcagctgggactacaggcgcccgccaccacgcctggctaattttgtttttgtattgttagtagagacggggtttcaccgtgttagccaggatggtctggatctcctgacctcatgatctgcccgcctcgacctcccaaagtgctgggattacaggcgtgagccatcgcgcctggcagttttcagatttttatcagcctttcttctatgctcccgattcttttataaattgtattacattgtttttgtgtctctatattgcgtttatgtctatggtatttgtattattaacttttgtttcttttgtgaactctggtagcttggtttcactatctttatttcctctttaatttcatatcccttctcagaaagtctccttttcagatcgtttttttccctctttagtttcttgagcgtgtagactattatttgtttactttttttttcatttcctgtggtaattcttctgatacatattctttttaagtgtttttcttctatatttataacaattgtacaggtggtaaattatacatgccatagtactatagccaggtctgctccttggaaagtctttatgtaatatggaaagaaaatctggaggtgggagaattagaaatctgacatcagtagcaggaagattggatctagatgatggggagacacagggtggttacttcattgtgtaaggcagagattggggctgggatgtgacactctgagttggtaggaaaaagagcctgagtgtaaagagaagaacaaggctgatctgagtagcaagaccctctaccctaccttactggaataagctcatccatgcacagaaagctgtaggaaactgtgcacactgctatcaagtatagttttgaatggccaaattatttatttgatgttagttaagcaaacagtttttaccaccgtgaaaactttttctgcctctatcatttctgctggtctccatatagtcccattaaaaaaaaaatcaagcaataaaaaatatacatactaaaagtgaaagctgatcttaaacttcctcccagtccttcacctccttcctaagaagtaactactatttaacaattagctgtgctgtgtctacatcttgaccttttcctgcgtatgcttatacataagaattttctgtctttactaatatatcttttcaatctttctatgccagtaaatatttttctactacaaaaatcatttgtatagtattatatactattattgtatactatatattgtactatatattgtatactatatattgtgtagtattatatacctattatttatttaactatctgctgttcttggtcacacatttaccctaaaatgcagcagtgaacagtcctctatgtggatattatgagagtttctgtagcatataatcctagaagtggattttgtgggtataagaatatggacagataaaattttgataagtactgagaaataatacttcaaaaagcctgttccaatttactgtctcattaatgagtctattttcccacatctttatcaaaagaatattattctgatttttttatttttgcccattagataagttaagaattgtgactcattacttataaaatttgcatactaccaactgcagtggaatttcagcatattttaaaaatactctttgacccatttcttttgtaaatttctgtctatttttagtagcttttttcagttctttttggtttctagaggtcctttatattggttattaattgcttctctgttgaagatgttggaaatattttctcagtctctcatttttgaatttatttataatctttctattattcaaactatttgaacctttatatagccaaatattttaactttatggcttttatatctttgcttataagaatgttctctaaggttaagatgaagtttgcctatatatttttttctgatatgtatgtagttattaatgcttttaatgttttattgagcttagtttttaatctgtctgtaaataattagcctcttattttgacactgcttattgaattgttggttctttttcctctaatttgaaatatcacctgctttatctttccatattgatttatgtatctactctgggaccagtgccacactgttgttggtatttagaatggtcaggcaagttcttcctcattattcctctcttcaaaattgtgctggctatttcgtttcaagccatctgtttagagttttgattggaaatggtatcaaatttatacataaattcgaagagaactgatgaaacgggaaagttcccttattctcctcacagggcgtgtgacaggggcatgactggtttcttcagtgccccactgcccaaagccctagagggaacatgcagacagtcaggtcggggggcgtctagggttgagtgtttacagctctcaaagccccagtgggcatgtgttacagtgcactctttcagttttgccatccacaggtggcttgtattaatcagctcaattacagcctctgccttattgcaaggacagagggctttctgtatcccggggttcttgccctagagtactggaaaaatcggatcacatgtgggcttggaggatgggtgcaaggttttattgagtggaggtagctctcagtgaggtggatggggagggcaaaagggggatggagtgggaaggttgtcttcccctggaattggggtgcccaatggctggacttccctccgactgaatttcccatattgtctgcgtcattctgctgttgatggcctgctggcatctgctggtgtgttcttctgccagtgtgttcctctcaacatccagacacttgtgtgtgcgcccgctagggtctcagagattttatgggcacaggatggaggatgtgatgggccagagtggtcttggaaaatgcaacatttgggtgcagaaacaggagtgcctgtccttacttaggtccctgggcacaggcctgagagtgaagccctcaccagggaccctgcccttctctatccagcatttccctatctccctcctgtatcactgatatcttttactattgagtcttcacatccagaaacataatttggccttctgttaatttagagcttcttttattttcttctgtaaaaatttacagcattctttatattatatgtttcttattgaatttaattatgaacaggttatactttgttattatcatgggatcttttaaatacattctaattggttatgacaggtttaaaaagctactcttaatttttctgtgttgatcttgtatcccaactaaatcctgtgtttgttctaaatgcttactagtagtgcctcttaggtgttctaggtggctactcatagcgtctgataacaataatagtttgtctttttctttcctatatttacaccaatttttttctcctaacatttaaaggttttttttttttttcagtttcctgtaatgattatttattgaatttggaagatctccattgtggtgttaatttcttaaaagcttagtgtttcttgcttgctcttatttgttgctgaggacttagattaaacagtttattgcttttgaagtatattttgtcagtccagttgagggactgagtctcagtccagatgagggactgccagtttgtctagcagttgatacaaactaattacctctggtaactttgcaggagctgaaaacagaagtgtgactagtaaggtgtgaaggtggcttgatttctagatatgaggctcttggtgcttgttggctgacagacactctccctttctttagttcagcagccactctggtagtcttaaacgtcagagtttttaagaggggtattcatagcccaaatctagggataaatgtaggagatggaggaaaggggagttgccgttttattggtgccactgtttagttaaaatacctaaaacattttctcattcccctttttcctgcctccactgcctttggatgtagatttattctggagttctgttgggaaaacacactattttggaatgttttacttgtctactgagagggttcttcggctattttggactatgttgtcaatctatttgctattgctgtgtcacttctagaaactcctcattgtcctggactactggcaaagcttgttttcaatgctgttatgaatttgctaatttatttcctttgtatctattgtatttatgcacagactttatgttagatccttttggttgattgttatccttaattagggataatgccatctggacctgttaatttgctcaagaactgagtggagaggggtggatggaggatgacacattactcactatttaacaaaataaaggtttttttccataataaagcttgttatataacaggtaaaaaatacagaaaaacaagaggaagaaaatgatcattcataattcagtcatgacaatcactgctaatatttagatatgttagcagtgatatcatattatatatatatattagatatattaaaggactatcagtcctctcctgatgcatatttaacattcttgtgattatattctgtgcagcattttgtatttattttttccagttaacattttaacacatttcctgtatcattaggaacactcatgattaaatccttactttaataatatcataagatagagtaaaatggatcctccaagggtgatacttacttgtctttggccatttgggttaatttggtatttagttcttttaagaaggaaattcgatttttatacatttattattaaattttttgaaataaaatctacagtgaaatgtatagagcctaagtgtctaatttgatgttttgataatgcttacatttaagtaatcatgaccccaatcggatacagcatatttacctgactcactttttaatttaatttaatttaatttttgagacagggcctcactctgtcgcccaggctgaagtgtactggcacaatcatagctcactgcagttttaacctcctgggcttgagggatcctcctgcttcagcctcctgagtagctgggactacaggggtacaccatgtctggctaatttttttttcattttttgtggagacagggtctcactatattgcccaggctggcctcaagtgatcctcctgcctcagcctcccaaagccctgggattacagtcatgagccaccatacctggccaactcattttaataatgtctaatgatgaacacctataagaaggtttttcatatttatgtacttggactgtgattctaaaagtgaaataacttggctttattttacaaaccttttagtggactttactaaaatcgcttccagaagtttgtatcaatttacattcccaccagtaagtggagagtgtcaatctttttttctgtgatccccctaacattttttgactatcccccagcagataagctgcacagtttcttgttgaaagcaagttatgactctttctgttaatatctacttccactcaatcatggttgtgtgtgtgtgtgtgtgtgtacgtgtaaaccatcactgttcatgcattcagtggtgttgtaacatttctcccacaagcaaccttcattggcattatttatttatgacagtgtcttcctcatgaaatcatgtctcagtagctcttctctgtcttctttcaaagactgtggtatttctagtcacacaggctctaaaattcatgagtcccaattaatgtctcttttgctccaatttattccaactcttgttcattctgttttcctggctcacagctcttcctactctgtctttccattttcattctcattgccttattttagccctttatgacctcttacttaaaaaatttctatagcttatacctacactttctccctacgcaaatctgtctgacccatgattgctagattaatcactccagagaatttgtgcttaaatattgttactcaaaatactttagtctccactcaaaatccttctcctggggatgtcagcaacatggcagaacaggagactcctgactattccatctctcacagacatacaagtaaacacctacacatgaattagttctctccaagaggaagctagaatccagttgaaagtctcccacacactggaagactgagaaaatacccacatccaaacaggtaggaaaagcagagacacacttgcactaatcctaccatgagcacaacgccttataattaggaaggaaactccaactcccagcttcttccagaaggttgggagtcttgtaccacatgtatagtgcccaacttttacagttcctgtgggagggctttgatcttaagttaccatgcttgaagaacagtagggacagtgcattggaggatttctctcaagcacaatggacaaaggggcttttgaaccatgtgaggactcccagctactctagcccccagggatcagcccaacttctaacttccccctaaagagggttcagcctaagacttttcaaggaactccctgtggctctggcttctaacaagctggtatctgggagtctaataaggagcctataaggattaaacttctttgagtctaaatcagaaagaaggcactccctgtgccttctccccttgctgtctcctgatataaattcctgcaatctctcattagaaagagaagggtgtacctctccatgtctgaaaggaaaagggggcactctctattcctctaccctggcttgctttcacgataagatcacacaaggctccccctacaaggagggtgtgaaacttctgcttgcttgaataggagagtgggcatcacttgcactttcttccttggcttgttccagtgacgatttcagccctacaatatctccatggaaagaagtttgatgcctccaccagcaagaatgaaagggatggcactcctcatgctctttttctcagtttgctcaggagataaactcctgaaatatctcattggaaggagatagagggacctctccatgactgaaaaggaaagtgagaagtccctgacccttctgctctggcttgtttcagcaataactccagaccagaagcctgtccctactagaagagtgagagacttttgcttgcatgaacaggaaagtgggcgttctctgaaatatcttctctggcttgctccatcagtaaatacagatctgcaggtcctggaagtagtttctgcaagcaccaaggactccatcttttacagtttccaacaaggtactggcttctaaattacctagatcttggagttaatggagctctacattcctgagtttcctaagttacagagaacataaagatgacttttaaacatgcaaattttcagcaaatatttccacaggtccaaagtgagaagtctgatcaagaatacaagtatctctctcagtcactcaccttgtgtacagcagaacaagtgtgagataaactctggctgtcaacttctctgcaaagaaagaaggaactggaacatatcttacacctcaacctcttcagctgcattctaaggaactgacttctatcccacttctctcaaggcaatagcatgacttgacactctctaatttctttggggacactaagaacaaagacatcaggttagatgagtacaaggagtttggaagcaccaggaatctctggctgggctgatgggggagaaacatcttttacatgggaccagtctaacaaaattgagagagatggttcttttatctaatgcatggaaacaaacatgagagccaaggaaaaatgaagaaacgtggaaatgtgttctaaatataagatacatctctggaagccaaccccaatgaagtggagatatgtgatttacatgacagggaattcaaaaggacagtcataaagatacttactgagacaaggagagcaatgcaagaacaaactgagaactttaaaaaaagatagaaaatataaaaatagcagcaaacaaaaataattgagctgaagaatacaataatggggctcaaaaatttaatagagggtttcaataccaatctatataaagcagaagaaagaattagcaaacttgatgacaagtcattagaagtcatccaatctaagaagtcaaaagaaaaaagaatgaaaaagggtgaagacagtgtaggggatttgtgggacaccattaagtggaataatatatacattatcagtgtaccagaaggagaaaagaaacagaaagggacagaaaacattcaaggaaataatggcagaaaatttcctaagtctggaaaagaaaatagaaatccatatccatgaagctcaatggtctgttataggataaattcaaagggacacacaccaagacacattacaatcaaattgtcaaaagttaaagacaaagagaatattgaaagcagtaagggaggagtgacttgttacatacatgggacctctagaagactgtcaatggattttccacagaaatcctgaagggtagaagggaaagggatgatatattcaaaactgaaataaaaaaaagaaccctgccaaccaagaatactatacccagcaatcctgtcccttaaaggtgaagaagagataaaaactttctgagacaaacaaaaggtgagggaatttatcaccattagacctaccttacaagaatgctaacaatagtccctcaagcttaaggaaaaattgttaagtagcaacatcaaagtatattaaaacataaaacttactggtaaaagtaagtatgtagttaaactcagaacactcttagattggaacagtggtgtgaaaataaattttgtttctagcatgaaaattaaaagacaaaactataaaaacaactgtagttacactaacttgttaagggacacaaactaaaaattacaaaacatgtcaaaaaaacaaatggagaggaataaaagtatagagtttgtgcaagtgatcaaagttaaatcattatcagcttaacaagggatgttcttagcatatgatgttttatataatcctcatagtggccaaaaaaaaaaaaaaaacaactccttagtggatacaccaaagataaaaagaaaggattcaaagcatactgtgataggaaatcatcaagccacaaaagacaaccataagagaggaagagaggaacaagtaatctacaaattaaccagaaaacaattaacaaaatggcaatagtaagtctttatctatcaataattactttaaatgtaaatgaactaagttattcaatcaaaatacatcaagtggctaaatggattaaccaaaaaaaagactcagtgatatgctgccaacaagagactcatttcatctctaagaacatacatagaccaaaaatgaagggatggaaaaagttattccatggaaatagaaatcaaaatagagcagggatagctatacttatatcacacaaaatagaccttaagtcaaaaactataaaaagaggtgaagaaggtcattatatgacgataaagtggtcaattcatcaagaagatatgacagttgtagatatgcatccatccaaagttggaacacctaaattggtaaagcagatattaatagatccaaggaatgagatagactgtaatataataatagtaggataactaaatactacacttttaacattggacagatcatctagacagaaaatattggacttgaagtatgctttatttatttatttattttgagacagggtctcactcttttgcccaagctggaatgtagtggcaagaccatggcttactgcaacctctacctcccctggctcaagtgatacccccacctcagcttcttgagtggctggaactacaggcatgcaccaccattcccagctaatttttgtatttttttgtggagacagggttttgccatgttttccagtctggcctcaaactcttgggcttcagcaattcacctggcttggccttccaaagtgctgggattacaaatgtgaggcactgcacctgccctgaactacgcttcagatcaaataaacctaacagacatttatagaacattccattcaacagcaagagaatataaattcttctcaagtgcatctggaacattctccaggatatatcatatgataggctgaaaacaagtcttaacacatttaaaatgattgaaataatattgagtattttttctgaccacaatggcataaaactagaaatccataacaagaggaaccttgaaaaattcccaaatatatgagaattaaacagcctgtttctgaataactgatgggtcaaaggggaaattaaaagagaaattaaaaaatatcttaagacaaatgaaaatggtaacacaacatatcaaaatttatggaatgcagcaaaagcagtcctgtgagggaattttatgacaatacatgcctacatcaaaaaaggaaaaagatttcaaataaacattggtagaaacgggatatccacatgcagaagaaggaaattggatcattttcttacaccatatacaaaataaactcaaaatgagtaaaagatttaaatgttaaggcctgaaactgtgaagttgcttggagaaaatgggaaaagctccatgttgttgatctgggcaatgatttcttggacagaactccaaaaaccacaggcaacaaaagcaaaaatagacaattgggattgcattaaattaaaaagcacagcaaaggaaacaattaacagagtaaagacacacccatgaattggcagaaaatatttgcaaaaacttagacatctgatgagggcctgatatccaaaatatatgaggaactcaaaccactcaatagtaaaaaatcaaactgattaaaaactgagcaaaagatctgaatagacattcctcaaaagagatataaatggccaacagatatatgaaaaaaagttcataatatctaattatcagggaaatgcaaattaaaaccacaatgagatatgacctcacagctgttagaatggctattattaaaaaataggaatgataaagttttgatgaggaggtggagaaaagggaactgtttattggtatgtaaattagtatagctattttggaaaagagtatgggagttcctcaaaaaacgaaaaataggattgccatatgatccagcaatctcacttctaagtatacatccccagaactgaaactgatatgtcaaagaaatatttgcactcccctgttcattgcagcataattcactatagtcaaggcatgcaaaactcacaaaagccaaggtatagaacaaatgaatggtttaaaaatgtggtaaatatacacaatagaatactatttagccttaaataagaaggaaattttgccatttgcagcaacatggatacagccagaggacagtgaatgaaattatccaggcacagaaagacaaatgctgcctgatttctttcatatgtggaagctaaaaaagtcgaccttacagaactagagagtagaaaggtggttaccagaacctggagggatggggaaaggaaagatgtcgatcaaagtgtccacggtttcagttagactggagaaataaattttagtgttctattgcactttatggtgaccacactaaaaaaaaatgtactgtatatttcaagtttgttaaaataatagatctttaacattctcaccacaaaaaattagtgagttgatgaatatgttacttagcttggttgaaacttgaatgtatacatcaaaacaaaagagcatattctataaatatagatgatgattatttgtcagtttttaaaaattgaatcttggcatttagggccctccatagtcttccatttttattcctctttatctctttgatcatatctatattctagccagagagaacacttgttttaatcatatttgacacaattctctattgttctctgctttagtcaagtttttgccttttctggagtactttttgctcctccatgatttaatttttcaaattttaccttttctcaaaattcagtatagatgtcatttctttcacaaaattttccctgttaagcccagaaaaataatctcttttccctctgaatcattagggtactttattcatttttgttttgagtgttattttcttaccaagaaaatattatttctttcagtattatgttgaattatgattcattcactgtctaaacctccttattgagtggaaatttctatgagggcaagttacaggtttaaaattatttatttatttttttcaatatcttgcacacagcagaaaattggcaaataaatgtttattgtctgagtcgtactggggagaggaatggaatttggagcaaaggacataacttatttgaatatattggaaaacataccaatctagcatttgttctttaaaaaaatgagttcacaagtgagatatggagcaagatttttagaggttcaaggactgacacatttctgtgggatattctggtttgacttccaaatcacctctgggtcaagacactggaggtgttttagagcttaaaatagaaactcggagctcagtgaaaaaatatatgatcgattattgctgcaaatgtatagaaaatggaattagcacatgcccgtagtatttcaaccatgcttaaagacagtctttctgttgccttaaccccttttgaccacagatggccgtattaagaaaatatttattaaaaatcacagaggtctattcttcatctgctaaactggtagattttaaggatatggtcccttctccatggtgctttaatatttgctaaatgtgtatgtgcacacatgtgtgtgtgcacttcacatcttatccgggcatattggaaaccttgtaatatagtttttgtttatttttaaccttcctctctactgccttccactaccaccatttaaatacacaaaactgtcactgtgtgagatatggccattatgttgctagctcttctgtgatgtttataaaatatgtcaactccctatagtgaattggcattgttttgctctcccacttcctatcaacgaaaaaaagcaaatgcccccaagtaaataatctaactcattaaccctcactgcattacagagatggaaaaatttatcaataataagagctgagcatcaggggaagatgctttatcttaccccaaacctggagactcatcccggggggcaccaggtctctgcagtagctcccatctccttgcccatactcttactctccacctgcaccattcatctgaataaattagcctcactgagaggaagatgacagcaaagagcgcacctgcaatgtagtgtgactgccgcagcttagtaaggggtttccagggaagcggtttctaaaacacaggggaggagaattgtcagggtttggctccttgtgaaatttgcctgtcagaacagatgatgcgtttgggcataacacactccagtttgttcttctggcagtttctcttctcaatttcaaggctttcacagttttgctgcaacttatccttttaaggggctcttcttctcccatttctccattgactgttggtccagagaggtgagagattatgttgaaattgtctgcttaggactgatttgctgtagaatcaggccaatcacaacaacgggcccctccagcatctgccctcactgcccttgttttcagggcaccatccccccatcctccggtttgtctggaattggagggggtctgggggactgatgttccacaagccatgatcagactagttcagagggcagtgggctttttctggaaatg

SEQ ID NO: 77 - DNA, 177856 bp, Homo sapiens
cgcgaccctgcgcggggcaccgagtgcgctgctgtgcgagtgggatccgccgcgtccttgctctgcccgcgccgccaccgccgccgtctcccggggcccccgcgcacgctcctccgcgtgctctcgcctaccgctgccgaggaaactgacggagcccgagcgcggcggcggggctcagagccaggcgagtcagctgatccggcccaccccgctcggcacccgagagagacccctagcggcgccgccggggaactgcgcccgctcgcgccgggaggggccctcgcgccccgcgcccacaggtgcacgcgcccttggcgccgcctgcaccccacgcgccccctccgctccccggccgacggcccacctgggcttcgtgaacagtgggagggagagtctggggccaggagagggacggtgcaggatcagggaaaggtgagtcctaggacgctgaggctctagaaaagtcgagagcgctcctgctcgtccccgtgagcttgaatcatccgaccccgcaggcctcccgggggtgtcgtataaaggactgctgctagggtgcgtttttatccgcatttcgttttttctctcggtttggagaggtggggcaggcgtttctggaagagaatgagaacgagtgaagcttaaaggaaataggattttctttgcttgttgagacagcaaaacctcattttttaacccccaacgtcaaaagcaggcacgagcaacctggaatttctatctttagaacgaaccaaaggagcaaggcgcaggacctggcaaagaagcggccaacccatttacttcttcttgaaagcagggttctgggcttgggttttgtttctttcttatatttttgtttgtttttggttttgttttgttaaagggggtggtcagtgtggattttgcggggcggggggtctttttttgttgttaagcagggatgtaacatccatctgagttggggaagaaggaaaaattaggagagatcattcgtattcgacccccgtaaatgaggacttctgacctcaaacgctgcccttgttcttcattgtgtctgtcctgaattatagaaatgaaccttctgccatgccactttctcctggattaaacacaaaccgtccactgtccagttagtgtccagatagtttagaatgctctagaactgcccagatatatcccctgctcttgacctgaagtagcatttagttaccaagccacagcccactccacacagggcttggagcgaaggactgaagccagggagtgctctggcccttctgagggctgcactgcagcctgccttctctcccttgctcattgcgctgacaagggtgcctaggcccgggaaggatggctcagccagcggggtacagacttccttcctgggaagtcatttctgtaccagctcccctaaatgttgtcttgtgtgtcttttcccgcactaggcattcagtcttgactcttggattacttttgcccctgaatgtcctttggatgtcctcaacaaataaggacaaatatttattgtcatgcagtatttgtttatacgcttcatgtcatttacttcctacaaaagccaaagaggctgttactattattcctatttatacatcaggaaaatgaagctaatgaactcccaaatctaatagcaagtaagtgacatgaagctgggacagcagggaaaagcctaaagtgacaggacaaacccagttgttcactttctgcaccacatttacccaccgcaattccgtatttgttccgggtctgcatgagcaaataaggcaaaaaagaaggtatctgaatgcaaagagaaacgtggtccaaagctacaaatcttgcagagtccactgcaaaatgcaaacgtgagaccctttgttacattattaagaattttaaggccgggcctggtggctcatgcctgtaatcccagcactttaggaggcccaggtgggcagatcacctgaggtcaggagttctagaccagcctggccaacatggtgaaacccccatctctactaaaaatgcaaaaattagccgagcgtggttactcctgcctgtaatcccagctactccagaggctgaggcaggagaatcgcttgaacctgggaggcggaggttgcagtgagccaagattgtgccattgcactccagcctgggcgacagagcgagactccacctcaaaaaaaagaaaaaaaattaaattaagaattttaagatggcaatggcagagcgttaaaccaagcatggggctcctcccaccgcagggcctgtgagactctccagggttgcatgcccatgaagccagccctgggaaggaggaggcaactttaagagtgagggacttttctttgggaggctgaggcgggcggatcacgaggtcaggagatcaacaccatcctggctaacacggtgaaaccccgtctctactaaaaatacaaaaaattagccgggcgtcgtggcgggcgcctgtagtcccagctactggggaggctgaggcaggagaatggcgtgaacccgggaggctgagcttgaagtgagccgagatcgcgccactgcactccagcctgggcgacagagcgagactccgtctcaaaaaaaaaaaaagagagtaaggaacttttattgagcatgaaattcaaaattgtagagatgagatcataatctataaaaattaaagttcttagatttagcagtttctctttccactgttgaaattcaccacactgacacattccctggtcaagatgttcctgggggaagatgattatgctgctgattgcgtcagaatgatggacattgcctgcatgttctctggttccttcactactcagagatcctgatggctttttgcttttcagccactagctctgttctgcatttaatgccatttcctgccctgaggtgtcttgcagatcctccaagcagaaaacgcaggaacatccctagttataaccctacaaagttggggaaggaaccaacaaccacttgtctgctggaattcctacaacagcatccccatcctagtttcaagtgtctccatttgtgagatattcactggctctccagactgtgcattctatctttgggcatttctggttactagaatgttcttatcccatttaaagctcacatcccccgcctttaaactcccactcagatatccttgtatccccagtgaccaagcagaataattcttttccacacttcagatctttacaaatttgccagcggttttcatgctacttcttcctctagagtcttctcttcacaaggtaaaacaggcacttccttcaacagttgcataatggcatggtttctggttccttccacaccttggccattctctaaatgtgttctggcttgtctgtgtctttttacagtactcgaagtgtgctctgactgctgcaacatgggagatgttgcccactactctgcctggagcctcatgttgcatttgactgttttagtaaccgcatcccactgcagactccaattggtccagataccccatttctattttatgcatagtctgctgggccgcgtttctgtcgtcttgtgtttaggctgttatctgtgccctataaatatcaccaaaagcaatcgttaagtctgagccagatgaaccctgcaggggtgccataacttaccatagactggatggatcaaacaccagaaatgtatttcctcacatttcaggaggctggaagtctgaaatcgaggtgttggctgagttggttacttctgaggcctctctccttggcttgcagatggccaccttctccctgtattctcacatggtcttccctctgtgtcttactgtgccctaatctcctcttgttataaggacagcagatattgggttaggatccatgctaatgacctcatttaaccttaattacatctttgaccctatctccaaatatggtcacattttgagacactgtcgggttaggacttcaacatatgaatttgggggtgggggtacataatatgtccttctttagaacagctaagacttattctataatcctgtcactcatctttggcctttatttccagtgacctttctttcattttcagtctgaagatcattcaactcaacagaaaaaaaaaaaatagaaatggaagagatctactttctgtctgtcctgcatcagcattgcatcatgatccccatgcagctggcttacccctcccgcaatcatcaggctctgaaaagaaagaaaatgaccttttatactttcctttagaaaattttgtcaaagcttaaacattgacatttaatgacatttaaaatctgtattagtttactagagctgccataacaaaatatcacagactgggtggcttaaaccaagaaatttattttctcacagttccagaaaagtctaagatcaagatgcagataggattggaatcctcagaggtctccttggcttgcagatggctgcacccttgctaagtcctcacacgttctttcctctgcacaggtacctctggtatttctgtgtgtcctaatctcctcctcttacaagaataccagccagattatattagggcccacgccagtggccttaatttaattagctcttcaaaggccctacccaaatacagtcatgttctaaggtactgggggttagggcttcaacatatgaattttgggggaacataagtctataaccaaacctctaaaattcccctaaaattattctcacattttaagctactctgatgtccgtccttgggagtggattccttctactttttattcatgtccttttgaaatcagaaaccttcctaggtaattagaatatttctttagctgcttcctggttgaatatatggattacttagccactccagacttccggtagtgttgggaattaccatgctttccatgaagatgtgagcttgctgggtatcatgtacgttggcagacgcagtgacgtatttgagagtttcacatgcctcttaacctgtctttcctcccagaaccgtgtgctaactcctcatcaaagaccagaagtagatcctgaattgtattcattctcatctctttctacctcctccaagacagaaggacatgattaacttctttatctcaatgtcagccttcaatagctacaaaagtctaaactgtaaatagcgttgaagctttgcataataaaattcttttccccagtgatgggcagtttttcacatagtaacattcttttaatctttttttctttttaatgagtagacataaagaaatgcttaaataaataattatcaactaacttacctacatttaactacacatacctaacagacctgaatataggcagaggatgtgacattttacttacccttttattaaagttactgcttcatttattggtctttacttcactagtgcatccataaaatgtttacatttttttaaacaataaaatactcttgaaattagtccttctctgtaatcactacataaaactgctttagagacagccttcagatcaactaaattatattttacaaaatggcttaggtatttcagtagtaactctatggaacaacagaattcactgtttaaccagggaccaatattggcagctggcttccataacttgtttgaggaatgtagtaattccaaggttgctgcaaggactaatgtacaggaatattcctgtattttatggaataaaaaggaagaacgagaggagaaagaaatagatagtacataccaaccccagaggtagggagtatgaaaatcaatcaagtagccagaagatgtaatggagccatgtgggtcttacgtcagttctcttccttagagaactttggataatagggcaacaatatgctctggtggaaaagaactcaggccttgagaaagcctgagcactacagtttctgaagaatgctcctttcattaggtggtgtggtgatgaattgtaaaggcacccagcacagtgcctggtttaccatagaaatcggttcttttttcttgagagaacaacaattcgcaatagctgtcacttaagtgaccagcataatcctggctttgagcttgccaggggctgccagttagaacaatggctgtcaaccccgtgttatttatttagatttcctaagtaatgttttgctaataaaagctccaaatttgtgagtgatttactcttgttttatttatttaataaagtggcacgatttattaatttaattaattatttaattaattattagcagtggcacaatctcagctcactgcaacctctacctcctgggctcaagtgatccttcacctcagcctccagagtagctggggctacaggtgcgcactaccatgtccagctaatttgtgtactttttgtagagatggggtcttgccatgttatccaggttggtcttaaactcctgagctcgtgatccaccctccttgatctcctaaaatgcagggattataggcatgagccactgtgtctggttgatttattttaatttaaataaaagcaactcgaggttagcatcatatcaggctactctcagttgtattctagtatctctcttgagtgtgggagtaagggatggagctgtagctagtttgctgagaactggacaaaaccctgaccactccctagggcgtgtgcctaggatgtgaaagatatgcctcctgttttcagacggcacccgtgcttggaaaggctgcttgccagaggtgttgaaaggatgccactgggctggtcctgcacaatggaagaccacatcacatgctccaagagagtcactccccagagcagctgcaggaagccacagctctgtggcctgggatccttgccacactgaatattagtgatagacattggagccgaggggatcttatgcttcaaggcagctggatctcttttttactggtcaaatcatacctaaggattgtctttcgtgtcctagagactttgatgagtaattcaacttttaaaatccaagtgaaggctgtggctagagaagcatgagctaaacctaaaatgaatgggaacattacagtctaacaagccttgagaattcaggttcacattccctaaagaaacaacatcctgaatgatgaaacaaacacacaaaccaaccaacaatttgtgatgtgagataccaaaacagacacccctttatcacctaagatggactgtaaggttaaggaaacaaagttacctacagggttagggttcggggactggctggcatgaccaatttctcaatttctatggctctaaactccctaataataggaactatcagccccatcctgtgatttacaacccagaccactacaactctaattggaatgaggaccagccttacaaacattcttttctgataagcaattgcagaccttaagccagtgtcagccagtttattagaggctgtgcacaaactgtctttgggtcctgtagttcaccttttgatgtaaagagccaaattttacctcattttaacactaaaaccctgccccaaagtgtacatgggatgtcacatacatatttacccattgcacatgcactcagctcccctcataaatatgtatatcttttcctccaaacctgctgaatatgtatgactccactgtgtgaaacagaccctgtgaggcatgaaacccaactgtccttcctctcttttgaagagagaccacattcagcatacaccgaagactatgtcttccgggtttgcaaattgatattgccaataaagctctcctttctgttatttagccatcacgatggtcttttgaatgataaattcacaaaagcaccaaatcattcaatatacaacgttgtccctgagcaaacacccaactttatcccttaaataacatttttgtcccgtgtgtaatttattcagttaaatataactattagaaatgaaagtgttcagtattggtggatcaataaaaaatttttatattctcactttgggtgggaattaaaaaaaaactggttcatttgctcccattaaggagctaatgtttatatgagaaaaatatctgggcaagaaaaagaaaaggcacagtgaaaaaagtacatcagtaaatacaatttagtataaagtatttgtgcacatatatgtgaattcatcagaagaaaagtaaggatcaggcctggtggcttgtgcctataatcccagcattttgggaggccaaggcaggaggatcacttgagcctaggagttcaagaccagtttgggctcaaaatgagaccctgtctctacaaaaaataaaatatattttttaaaatttaaaaattttggccaggcatgatggctcacacctgtattctcagcactttgggaggtcgaggtgggtgggttacttgaggtcaggtgtggtggtaggcacctgtaatcccagcaactcaggaggctgaggcaggagaattgcttgaacctgggaagtggaggttgcagtgagccgagatcgtgtcactgcactccagcctgggcgacagagcaagactccgtctgaaaaaaaaaataaaataaattaaaaaaataaaaattttttaaaaagaaaatgagagttacagacctgtagcgttggaagggtgaataagggaccttcagaggaggttttttgtttttgttttttatcagggtatttgataacaaccattaagaaagaagaaaggaggatgttcgaaggagaaaccatgtaaatacatcaagagtgttcatgatgggggtggtaagtgggagttagctataggaagaggtttttttttttgtttttttttttttgagactgactcttgctctgtcacctgggctggagtgcggtggtttgatctccactcactgcagcctcccccgctgccccgggttcaagtgattctcctgactcagcctcccgagtagctgggattacaggcacgcaccaccaggtccggctaatttttgtattttttagtacagacagggcttcaccatgttggccaggctggtcttgaactcttgacctcaagtgatctgcctgcctcagctgcctaaagtgttggaattacaggcatgagccagcacaaccggccaggaagaggtcttaatgttagaagacctgaggaatttaggtcagatggaataggcagcagtgggcaattagtcactacagatttaccaatcatgatctgacattttaacatttctagaggcttgtccacggggaaagtatagggagattcagaggatgaaaaagttgagattgggaagagaaggaagaagaatgtgccagaggttccaggaatgaacatagatagggtctgtgaaaagtttgtgaaaaaatcacacaaggacatcttattactaataaggatgcctaaggattacagtatgtcaggctgaggacgtatacagacgggatctctgaatactcatgagttgtattgggttaacattgcatgtcacaaatgaagaggtgaaagagtaaggggaagagaaaggagggtttgtacccagttctgtctaacctggacacctttagtgacaatgctgaactgcaaaggagaaaaagtgatttgaaaactttttttttttttttttttgagacagagtctcagtcttgctgtcttgcccaggcttgagtacagtggcgtgatcttggctcacggcaacctccgcctccagaactcaagctatcctcctgcctcagcctcctgagtaggggtgggattgcaggcacacatacacctggctaattttttttttttttgtattttgtatttttagtagagataggggtttcatcatgttgcctaggctggtcttgaactcctggcctcaagtgatccacccgcctcagcctcccaaagtgctgtgattgcaggcatgagccactgcacctggcctgaaatctttttttttaaatgagggaaataataaatttaatgttcattttgtaggtggaaatcagaagtacatgcaataggaattaacttgaatatgatgcataaagtttgaagcaaaggtgagtgatagatgaacattggtgatgtaactccggaagttgtctgtcataactgatgacttatccccatcatatgtgctgaaaactactcagatgaagttaacaacctgatattacaaaataagcatatatattttgtgtttataagaacctaataatcatctggagacttagtacttggggggtgagctatagatagccctgtgtatcagggttttccaaacaaacagaaccaatgggatatatatagatatataaagacacttcttataggaattggctcaggagattataaaggccaagaagttccaatatgtgccccctgcaagccgaagaaccaggaaatccagtgtaattcttgcatgtgaagctgaagggctgaagagtgtctgctggtattgaaggctcaagaacctggagctctgaagtcaagggcaggagcagatgatggatgtcccagcttcagaagagagagcaaatttgccttcctccacctcttttatgattcctatgctcagttaattgaatgatgcccactcacattagtgaggatgggtttttgatacccagtctattgattcaaatgctaatctcttccagaaatactctcacagactctcccagaaataatattttaccagctgtctgggcatcccttaacccaggatgggctaagagacaagtggacacataaagttaaccaccataccctgtaaatatggtatgagaagggatcgagtcatatttcatatcaagattattttccaatgcatagatgccttggaataatacttcttataaaataatgagtaacattttctagcacaagttccaaactgtgtaccatggaaccctagctcggtcatatgttgctcggtattgcatgcatacccgaaaagaattctgtaatcaagtaactttgagaaataagaggttaaacaaaattaaacaaataccttcactttaaaatgcatacaattctttaagatgataatctgcattttgaattttaaagagggtaggtagcttcagtatgtagcatcactccctctccctatttcttttttcttttttttttttttgagacatagtctctctcttttccccaggcatgatctctgctcactgcaacctctgcctccagggatcaagcaattctcatgcctcagcctcctgagtggctgggattacaggtgtgtgccaccatacccggctaatttttttttttgtatttttagtagagatggggtttcaccatgttggccaggctggtcttgaactcctgacctcaagtgatccacccacctcagcctcacaaagtgctgggattacgtgcacacacacctagctaatttttgtattttagaagagacggggtttcaccatgttgactgatctcgaactcctgacctcaagtgatccacctgcctgggtcacccaaagtgctgggattacaggcatgagccaccgcgcctgcctggcacctctccccattccttgtttttgtttgctgcaccaactcctagtgttgcacaaagcatgctttagggaatgtggtttggaagcattcgaatcaaacccttgaatttttttagacccttgtagaagtgaaggtttatagtgtacatttttgtcaaagcagatgggttcttttcactgaaagttgttttcacacatgaccttgaaaataaattaataaaaaaaaagtagaaatattaggctgacagacattttaaagtagggcataagatgccataaaaagccttttgaaagtttaaaataggagttaaagtgtgtgttatatggaagataccagattagagtctttgaatatttattatataaatgtgcaagtatatgaccagcttcttcccagtttgggggagtaatgggacggcattcagttcacatttgagactgcttctctttaaattttcgtaagtgaaaaggaagaaggatcactaagtttacaaagacaagtctcggaataagactttcgttcactgtattgcctttaatcatctggtgggagggccctcaagaagtggccaaggccctatgaagattggtgaagagtttcaaggaggagaattgaaggagacagctatgggattaattttgagagatgcctttgctgaaatgtctcataaaatatacatggagagcaagggcacaaggagacagagaactctctcggccaaacaataaatcagaatttccatagtttttctctgttagtccttattgaaaaatttgtctactgctaatggtgtcaagtagccctgccagccctcattattgtaccaaaaagcaaaacgaggaaaaggtttagggagctaggtctaaaaggaatatcatttctgtttcccaacaattagtgaaaacagattctgttaccaaaatcttgcagaaccaagggtcctaatacccactttattctggtgagtttgtcagtcgataaaaaatactaacaggccaggttcttttctcagataaacagtaaaataacatggttataaacagaaaaaaaatggtgaaaacacaaatcttggtgtattaggccattcttgcattgccaaaaagaaatatctgagactaggtagtttataaagaaaagaggccgggtgcaatggctcacacctgtaatcccagcactttgggaagctgaggtggacagataaccttaggtcaggagttcgagaccagcctggccaacgtggtgaaacctcatctctactaaaaatacaaaaattagctgggtgtggtggcatgcacctgtaatcctagctactcaggaggctgaggcaggagaatcacttgagcctcagagcagagatagtgccactgccttccagcgtgggccacaggatgagactccatctcaaaaaaaaagagagagagatttaatcagcttatgattcttcaggctttgcaggaagcctgatgctggcatctgcttggcttctggtgaggcctcaggaaacttacaatcatgatggaaggtgaagggggagtagggatgtcacatgaccagaccgggaacaagagaaagcatggtgccacacacttttaaacagccagatctcatgagaagtcactcatcacaaggacagcaacaaacagatagtgctaaacgattcatgagtaatccacccccatgatccaatcacctcctaccaggtcccgcctccaatactagggattacaattccacatgagatttgggtggggataagtacacaaactatatcattctgccccagcccctctcaaatctcatgtccctctctcatttcaaaatacaatcatgccttcccaacagtcctccaaggtcttgacttgttccagcattaactcaaaagtccaaagtccaaattccaagtccaaagtctcatctgagactcatctctttccatctatgagcctgtaaaatcaaaacaagttatttacttccaagatataatgggagtaccagcactgggtaaacattcccattccaaaagggagaaatcagccaaaagaaaggggctatagtcttcatgcaatttcaaaacccagcagggcagtcattaaaccttaaagttccaaaataatttcctttgactccatgtcccacatccagggcacactggagcaaggggtgggctcccaaggctatcagcagctctgcctctgtggctttgcagctgggtacagccctcatggctgctctcacaggttgttgagtgccatggcttttctaggcacaaggtgtaagctgctggtagatctgccattctcaggcctagaaggcaggggcccccttctcacagctctgccaggtcatgccccattggggactctgtgtggggtctccagcctcacacttccccttgtcactgccctagtagaggttatctttggaggctctgcacctgcaacaagtttctgcctgggcacccaggctttcttgtacagcctctgaaatttaggttgaggctgccaagcattctttaatcttatattctgtgcacctacatacataacactgtgtggaagcctccaagtcttatggcttgcattctccaaagtggcagcccaaactgtacctgggtccctttgaaccgcagctggagctggagtggctgggatatggagagcagtgttccaaggctgtgcagggcagtggggccttgggcctagcccacaaaaccattctttcttcctaggtctctgggtctgtgatggaaggagctgctgcaaaggtctcttaaataccttcaaggccttttccccattttcttggatattaccatctggattctttttagttatgcaaatatctctagcaagtggtttgctctgcaacctgcttggattcttcccatgaaaatgggctcagcttttcaaccacatggccagcctgcaaattttccaaacttatacgctgtccttcccttttaaatatgagttccagctttaagtcacttctttgctcctatatctgagtcgggctgctagaagcagccaggttaattcctaaatgctttgctgcttagaaatttcttctgccagataccctaggtcatcactcacaagttcaaacttccacacacccctggggcatgaagagaatgcagccaagttctttgctaatgcatagcacatgtgatctttgctccaattcccaataagttcctcatttccatctgagaccttggcaggcctggacttcactattcatatttctgtcagcattttggtgacaaccatttaaccagtttctaagatattccaaacttttcctcatcttcctgtcttctgagctctccaaactcttccaacctctgcccagttccaaagttacttccatgttttcagatatctttatatcaatgcccccattactcagcactaattttctgtgttacatcgttcttgcattgctgtaaagaaatacctgagatgggtaatttgtaaagaaaagaggactatttccctcacacttctgcaggctttacatgaatcacagtgctggcatctgcttgacttctggtgaagcttcagggagttttcaatcatggtggaatgcaaaggggaagcacacacatcacctggtgaaagcatgtgatgagcaagagagagagagcggttgggggtgttgccacacacttttaatgagaccagatctcatgtgaactcagagggagatctcacttatcaccaagggagtggcccaaggcattcatgagggatccacctccatgattgaaacatctcccaccaggccccacctctaacactgggattatacctcaacatgagatttagacaggggcaaatatccaaactctaccacctggttttcaggtcattctagagcactagcagctaccctggcttaaatcctgaaaagtatcaaatttatgtgtttttgaccgacataagaaaacaggtcaaagatttgcttagtccattgtaccatttctgccttaactacttgggagctactgggaattttctatttttaaaatcaggttgtatcaagattgtttggtgtttttcttttttcttttcttttttttttttttttttttgagacggagtcttgctctgtcgcccaggctggagggcagtgacgcgatctccgcttgcggcaagccccacctcccgggttcacaccattctcctgagcgcctcagcctcccgagtagctgggactacaggcatccgccaccatgcctggctaattttttgtatttttagtagagacggggtttcactctgttagccaggatgatctcgatctcctgacctcgtgatccacccaccttggcctcccagagtggtgtgattacaggcgtgagccactgcgcctggccctgtttggtgcttttcgaccaaaatctctaaacaactccaaaagccataaacagactaagctagaaaaaggcagacaaagatattagaaactaagcttgagtaactcaagtctttaatgctgtcttactagtctcagtaattcagcacctaggaaacatccacagaagacattttatcaatcaaaacaaagaagctcgggcaagcacagtgatgtgtgctcactcatagatagacttgtttttgaaattagtcttcagtgatattcattcagtgtgagatttagtctccataaaccgaagcacaacacaacttgaagctttactggacccttgggagtgagaagcagttctgtaatgtgtctgtgattaagtagcagtttcatcctgatttttcaagctcagagctctctaccctttcacatgcttgaagacaagatgttggacaactggcccagaggatgttttcctctcatttctgtaatcttctgataaggaaggaacgatgtgacttaacatgactctccttcaatctgaacgtgccagtgtaccttctttcccatcccactccatatatactctgtgtctgtcttttgttgttgttgttgttgtttgttttttgagacagagtctcactctgttgcccaggctagagtgcagtggcataatcatggctcactgcagcctcaacttccagggttcaagcagtcctctcacctcagtctcctgagtagctgggactacagttgggtaccaccatgcccagctaatttcttcaaatttttcatagagatggggtctcattatgttgcccaggctgatctcaaactcctgggctcaagcctcccaaagttcagggattgcaggagtgagccactgtgtctggcctccgtgactgtctgaagtctctctttcacaactctcttacagttcctgttagttgaggaaaaaaaatctggaattacagtgtttacaactgaaagggatgaagtagtcatttaggccaagtctttaatttgatgaggacttactggagagccagataaatgaagtcccttgcatatggtcatatgaatatttattggcaaagcttggcctttgtcctcctgacttccagatctcatttcatcttgtggtgcttccagcatctggccaccttgctagacctgagtcataaaagcaatggggcgctaagaccagccatactataggaagtggtgacagtttcctcatttaaagttgggttgtctttctagaatcttagagttggaactcaactcagaaatcacctgtttgatcctcccacaaaggcaggtgtctctcttgcaatattcttgagacaatcatctggcttctgcctccttattttctattatcgggagccagcttcaggaaataaaacatttcactagaatttttgtgttgttacatttagctaaaatttaccttctcttcacttctgtccttacatcccaacactgccccatgcagtaacaccaaatgcaaagacagactgtgctttcgaccacagggcactcctctagaagtgttaaaatacttatccagtatttcctcaagcttctctttttttctcaaagctaaatatctgatttttctaaactgtgccttataggttacagttgctggatcccttgtgatgctgaactttggatgtattccttttggcaaaatgactgtatcctacttatccaccaatttgacagatatttaataagcacctactaagttgcaggagatttaaaaaatacaagcatgtaaataagaaaatatacaaagtgatatataacaatacaggctgtggagaaaaattaagcagagcaaggggagatggaaaatttgtgtatggttaggagcttgggaccttgctattctattaatacagtgatcaggaaaggccccactgatgtagtgagctttgagcaaacaagtaaaggaaatgagggaggaagacttgcaactgtttggggagagaggatttgggcatagagaatagctcctgaggcagaaataagtctgatgtgtttggagaacagcgaggtggcccttgaggctccagtggagggcgtgagtgggagagtgggaggaagtgaggtcagggaggttgttatgggctgaatggtgtctccccggaattcacatgttgaagccataagccccagaacctcagcacatgactgtatttcgagataatgtctttaaagacctaaaatgaggtcactagggtgggccataatccaatatgactggtttcctcacaagaagaggaaattaggacacagatgggcacagggggaagaccatgtgacgacacagggagaagagagccatctataagccaagcagagaagcccccagagaagccaatcctgctgacaccttcatctcagcttccagcctccagaattgtgagaaaataaatttctgttgtttaaggcatccagtctctggtactttattatggctgtcctagaaagctaacacagaggggaaaagggccagatagtataagaccttgaaaaccattttaagttctttgagcagaaggggagccagtgagggtttcggagcagatgaaggtgatgactgggctcgtattttaaaagcatcactctagcttctgtactgaaagcagtctatggggaggcaaggacagaaggaagaaaaccaggaggaggctattgcagaaatgtacatgagggtggaaggtggtgaggagagggaagttttggaatatattctgaagttagagccaaaaggattttctgatgaactgaaattgtgatgtgagagaaagaaaggagtcaaagatgacccaaggcttttggccacagcaacttggagaacggagttaacattcattgagatggaaagaactgtaggagcagcgggcttttttttccttcttcaacttttaagttcaggggtacatgtggaggatgtgcagatttgttacataggtaaacgtgtgccatggtgatttgctgcacagatcaacccatcacataggtattaagccctgcgtccattagctatttttcctgatggagcagtgggttttaagggggaggaccaagagttcagtatggacacattaagattaagatgcctactcatctttgagtttgaaatgccagctaggctgttggatgcatgaatttagaattcagaggagtggtcagggtaaggatacagatggtactgagtgagatcacttagggtgaaatgaggacaaaaagaaggctttggaggctggggattgtggctcatgcctgtagtctcagcactttgagaagccgaggtgagtggatcacttgaggccaggagttcaagaccagcctggccaacatggcaaaaccctgtctctaccaaaaatacaaaaattagccaggtgtggtggcaggcattgtaatcccagctactcagaaggttgaggcatgagaatggcttgaacctgggaggcagaggttgcagtgagctgagatggcactactgcactcctgtctgggccacagagtgagacctggtccccctgagcacccccccaacaaagtaaaggatttgggattaagccctagtgtacttggaaatgttgaggttgttaagatgagcaggaaaaagagaagcaagcagaggaggggcagcgagtggagtaggaagagaaagagggtggtttccaaggagccaagtcaagaatgtgcttcgtgaggacagaatgattactgggttgatgctgcagatactgtgtgtcaaataaggtaaggactgcattgtatttagtgatagagaggtcattgctgacactgacaagagccagttcagaatggtggggacagaagtatgatttgagtgggctcaagagagagtaggggaaagaaatttgagtccagcaatgattaaaatattctttgggaagacttttgctgtgaagggagcaaaaagctgaaggtagctaaagagagataccaagagaaggtaattttattattattttttgagacggagctcactttgtcacccaggctggagtgcagtggtgggatcacagctcactgcagcctcaacctccttcactcaagcgatccttccacttcagccttctgagtagctggaactacaggcacgtgcaccacacccagctaatttttttatgagcttgagcctaggagttcaataccagtctgggcaacatagtgaagccccatctgtacaaaacaatacagaaattagtgcttgcttcagcagcacctatactaaaattggaatgatacggagaagtttagcacagcccctgtgcaagaatgacacgcacattcataaaacatttcatatatttgtagaagcacataggaaaaaaaatacaaaaattagccaggtgtggtggtgtatgcctgtagtcccagctacttgggaggctgaggcgggagaatcacctaagcccagaaggtcgagcctgcagtgagctgtgattgcaccactgcactccagcttgggagtggagtatcgcccagctggtcttgaacccctgggctcaagcgatcctcctgcctcggcctcccaaagtgcttagattacaggtatgagctgccgcacctggcaaagaggctttttttaattgaatatgtgaaaatatatttgtatgcagaggagaatgattctgtaacaaaggaaaatggacaaagcaggagaaggaacaattgttggaacaatgtcctagagtataagagagagtggcacactgaatacaagcacaggagttggtcttagatgggactgacatctctagctatattaccttatagacagccacatgtagctatttaaatgtaaattaatttaaaatgaagacaattaaattttttctggctgggctaggtggctcatgccacctcagcactttggaagcactttggaaggtcgaggtgggcggatcacgtgatgtcaggaggtcgagaccagcctggccaacatggcaacaccccatctgtactaaaaatacaaaaattagctggatgtggtggcatgcccctgtaatcccagctactcgggagcctgaggcaggagaatcgcttgaacctggaaggcggaggttgcagtgagctgagatcgtgccactgcactccagtctggaggacatagcaggactccatctcaaaaaaaaagaaaaaaaaaatccgttgtgctagccatatttcaagtgttcaatagctgcatatggttggcgactacagtactagacagcagcaacaaagaatattttggtcattacagaaagatctgctgagcatgcctgagctgagaaatgagggaaggcagacatatgtatgagcgcctatgcagagaggtgagtagatgtggttgcggggagcttgtggaaagtctttcctgatttcttctgtttctcactaaaggctacttaggagaaggacctggagctttgaggaaaaggtgcagactatatctttaggagatagagagagtgaggggacacggggaaaatggcagaattgcagaacaacttttaagatccacttcaggccagcacagtggctcacacccgtcatcccttttttaaaaactttgagacagggtcttgtgctataacctagactggagtgtggtggagcgatctcggctcactgcagcctcaacctccttgactcaagtgatcctcccacatcagcctccactacacccgactaatttttgtatattttgtagggacagggtttcactatgttgcccagactggtctcaaactcctagacttaagcaatctgcctgccttggcctcccaaagtgctgggcataagccaccacaactggccacacctgtaatcccaacactttgggagaccgaggtgcgagaatcgcttgaggccagttcaagatcatcctggacaacgtagtgagacctcttccaaacaaaaaagaattttaaaagttagtcaggtgtgaccgggtgtggtggctcatgcctgtaatcccagcactctgggaggctgaggtgggcagatcacaaggtcaagagatcaagaccatcctgggtaacatgttgaaaccccatctctactaaaaatacaaaaaattagccacgcgtggtggtgggcacctgtagtcccagctactcaggaggctgagggaggagaatggcgtgaacccgggaggcggagcttgcagtgagctgagatcgcgccactgcactccagcctgggtgacagagcaagactctgtctcaaaaaaaaaaaaaaaaaaaaagtcaggtatggtggttgtattagtccgttttcatgctgttgttaaaagacatacctgagaacgggcaattaacgaaagaaagaggtttaatcaacttacagttccacatgcctggggaggcctcacaatcctggcagaaggcaaggaagagcaagtcacatcttatgtggatggcagcaggcaaagagagagcttgtgcagagaaactcccatttttttttttaagccatcagatctcatgagacttattcattatcatgagagcagcacaggaaagattcacccccataattcaatcatttcccataattcaatcattatggaagctgcaagatgagatttgggtggggacacagaaccaaaccatatctgtggtgctcatctgtagtgctacctacttggggggctgaggccagaggagccctggaacccaggaatttgaggttgcagtgagctatggtgggccaccacactccagagccagcccatctctaaaaataatttttaaaatatccactttaggttagtgatctctaatttagggaaaccaatcagcatgctgtgtagttttttccaacttatgttcactggcatgaatgcactgttacagtaggtagaaagctggggctagtccaatgagtggttctctatcctggctgcatgttagaatcacctgggtgagttatttaaaaaaaaaaaaaaaaatcagaagcctcatccttgtagccaaaggatctgattgaacattctgaaaatggggcctgagcaacgaacaatctatttaaagctcccaaggtgattctaacacagacatgctttttttttttttttttttgagacaaggtctccctttgatgctcagactggagtgcagtggcgccatcttggcttaccgcaacctcagcctcccaggctcaagcgattctcctgcctcagtctcctgagtagctgggattacagacgcatgctactaccacctggctaattttttttgttctgtttttttttttttttttgtatttttattagagatggggtttcactgtgttggcctggctggccttgaactcctgacctcaaatgatccacccacctcaatctcccaaagtgctgggattacaggccagatacgtgtttaagaaccacggagttagagtaagaatgtggaggaaatgtgcagagtagagatgaaggatggggaactgtgttactgatggatcatgggttccacaggtgcaaagaaaggcactcaggatttgtgcagggatgggggacgggatgagattgagaagtgttcaaggctgatgagcaatgagagatgggctgggaatctagggcttcttgggtgacaaatacaaattgggtaaagggcacatggagatttgccatgctggtctaaatcagcacaatcaacataaatgtagtacagataattttaaatcttttattgaccttactagaaaagaaacaagtaaacttagtttaatagtatattttgttatccaatgtatgcaaaatattatttctttttttgttgtttttgcaaatttcttaaaaaaaaaaaatacagacagcatcttgctttgtcgaccaggctggtctcaaactcctggcctcaaactcctggcctcaagcagtcctaccacctcagcctcccaaaatgttgggactacacaaatgagccaccacacccagccccaaatatcatttcaacatgcaatcagtataaacattactgagatatttgtcatccttgtttttttatagttagtcttccaagtttgtgtgcattttacacttcaagcacatcccagttcagagcagacacatttcaagcgctcggtaaccacatgtgcagtggaccatgcaggtctaggtggtggtgatgaggtcgcaaatgttggatgatctctacagaacattcctttcagaatacaaacatactataatatactcaatcttaaggcagctgtatatgattatatagaattatgttcttatttaacccaatatagcttttccagaaaagtatcatgagagtcttagtcacatgctctgctaaagtccaaaaattccatgttggccacacttatctaatagaaattagtctggcatgaatttcctggtgaatccgtgcgagcatcagcttccagaggtgtcagtttcttttttctgtgtattctcatgccagtcttttaacaatccagtctgcctgcttgctttcatttgtgtggagctgatcttttcttattttctgacagttgaagttacttactctgggggagaaaggacgatgggaaaatgagcaaccacttgccatttaagtggtagcaaagctggatttgatttattagacctgatgctaggattccagattattataagcaagaaacggcttgcattgcttgtggaggatcacgtgacaaaggattgaccaatcgaccatggaaataacttgaaactaagttgccaaagagggggtggttggaggacaatgtctagataaaagggcaccaagaaaaatgaaggaaaggatgttatggagagaaaagcaacagagaagagtgccctcacacgtgctcgcagaaaaaaatcaggaagtcgactggggaaaaaaagtttgtgtggatgcttctctgtctacgtactgatgctcagagtgggaaagaagcaatctggtattttaacacagggaagtagacatggcttcatagatgacaccaagtgttggtagaataaaactgataactagagttaaggaatgagagtatagttctttttcaaaagaaactgacctgggagtatgctcttttgcttgcccagctggaaaaacatttaaaagctccctcttcaaacagacagcttgagtagccccagacccaggcgaactctttgtcattgtccatgccattagggcaggattttaaaacaggattctcacatcactgctctacgttggaacactgaatcagattatctttatcagacagtctacactctattccccctcttgttctggttttatgcatttctgtgctagactgagtacataatttgtcaataaagcacggattttgtgaatcagacacatccatgttaaaccggggtccatcatttcccacatggtgacatcattcctattagctaagcttagtctctatcctcctctacaaaatgaggataatgcaacatactccctggggctattatgaggctcctggggctattatgaggcttagggatgacatctgcgaagggcttggcaccaatgggcattcaataaatgctagttgggtatcgagactgtggactcaatttagacaaagatttttcatctggtttagctggttattatatatgacaaaaagagatcacaatgtgatagttggctaaagcagtctgagtcttaagtgaattctgctcagggccttaaaaatagacaaaggaaaaatgagagccaggctgggacatcttcaacaaaagtttgacatcattcttgtgaaagtattgggaggattctgatgggtggcctttagtctgacatatttcagccttcactctttctcatcaccttattgagctataattcacataccgtacaattcactcatttaaactgtacaatttaatagtttttagtatattcacagaggtgtgccaccattgccacagtcaatttgagggcattttcatcacttcaaaaacaaacccctctgcttctctctcccccagccctaggcaaccactaatctacattctttctctgtagatttccttgttctgggtattttatataaatggaatcatacattatgtggtcttttgtgattggcttctttcacttaacataatgtcttcaaagttcatccatgttgtatcacgtgtcagtacttcatttcttcttatgaccaaataccattccactggatggtataccttatttcatttgtctgtttgtcaattgatgggcatttgggttgtctccaccttttggccattatgaatactgttgctgtaaacatatgtgcataagtctttgtgtgggcattaaaaataaaaaatttcctttgagtatatgcctaggagtggaattgctgggtttcagccttctcttggtttttctgttacagggaagatcaagagttaaggactgtaccattatccccctaaaagactttcctgtaagaatcttaagttaataatgactgagcacctactgcataccaagtactattgtaggcactgggcagcttcagtaggcgtatcggattctagtctctcctgggtcaagatggagcctgacactagtgacaacttttattcacagcagtcataattgtaggctaccttatgggaacatctggtatgcccaacttacagggttgctgtgatactttgagtatcatgctttttctatttacttgtgtatgtctgcctttagctagaggcagtaaatgtggatcaaaaataaagatgtggggcccggcatggtgactcacgcctgtaatcccagcgctttgggaggccgaggcaggcagatcacttgaggtcaggagttcgagactagcctggccaacgtggtgaaaccctgtctctactaaaaatacaaaaattagccaggtgtggtggcgcatgcctgtaatcccagctacttgggcggctaagacaggagaattgcttgaacctgggaggcggaggttgtaatgagccgagattgcaccactgaactccagcctgggcgacagagcaagactctgtctcaaaataaataaatacatacatacatacatacatacatacatacatacatacatgcatacatatatgcataataaagatgtatgactttctttattgttgttgttttgagacaggatttcactctctagtccaggctggagtgctgtggtgtgatcctagctcactgcagccttgaactcctgggctgaagtgatcatcttgcctcagcctcccagacacctgggactacaggtgcacaccatcacggctggcgaatttatttatttatttattttttagagatagggccttgctgtgttgctcaggctggtcataaactcctggcctcaagcgatcttccactttgacctcccaaagtgctgggattgcaggcatgagcctccacacctggtgcagccgtacagctttcaaaaatgaagagaggaactcgtgggcactactggcatacatctaagaataaaatgtgaacaatctggttgttgtgttataacaacttggttaatacaatatgatattgatgagatgctcccaactcatcttggagtaactgaatgatgctacctgaaaggtagatatgagtaggaagtggaggtatacaggggctggagtggggcaaggaggctttccaggcatggagaaaagtgtaaactaagacacagcttatgtgagaaacaagcatagtacaagtaatctagtgttgctggatcataagggcttctgggataaagaatcttcaaagaaggagagatataattgcttaacatacagctcaccaatgggattatgcaatgatttataactgtcccctagatagctgtgtggcatcagacaagccattaacatctctgtgcctcatttgtcatcaaatgctgcatgggaataaaacgtcatgaattatctcctttctaaagtgacacatgaattgctaaaaaaaaaaaaaaaagaaaaattaagttctaaagaactttctttttttttctttttttgagatggagtctcactctgttgcccaagctagagtgcagtggtgcgatctcggctcactgcaagctcctcctccagggttcaagtgattctcctgcctcggcctcctgagtagctatgactataggcgcccgccatcacgcctggctaattttttgtatttttagtggagatggggtttcaccgtgttagccaggatggtcttgatctcctgacctcgtgatccgtctgcctcggtctcccaaagtgctgggattacaggcgtgagccactgcgcccaggctaagaactttctaatattgtcctatatgtagccaagccttgtgcagataaagattattattgccgtttgggacaagtggatgctttcagagagtcttagttgaggtttcctagaggctgaacctgagatagagatccttatgcaagtggtttattgaacttactagttttggaagaaactagtaagaaggtgagggaagcagaaaagggcaggaggagaagcaaatgcaaatgttaaaatagaaggatttaaccactttcaaaaagagggcactcatttacaaagtagtaaaggacacacatttaattatataaaaatgtgcatagatgtttggaaattttgacatgtagtcacagaataatgtgaaaattatatacaattattgacattcaaatagcagaaacatagaaagtcaaaggttggccatggatgaccctcatcaagggcaaatgtgtacacatctatgcacttatatttaatggcaatgaacttgtcagctacagcctgtttgacatttacagaatgatgtgtgataatgggattgatgaattcattagcattatgaatcatacataaatagaatctttagcacattttattaagtgtgaactaaaatatgttgtttggagaggacaaagattacaaatgttttaaactgggttcccaaagggcaaggaaaattaaacagtcagattccaccctaaatgatcaaaaggtggaatgtacatctcagtcacgttgtgctgatgtggcagtagggccagaggagttttggaaaatccaaagaagcacaaagcttgagtatgagcataaaggaaaacaccaagcgctgagtcagacactggacaagaagttcttttctgatttttcaaatgaaaagactgtacagttgagattaaggttcattaatttattgattcaaccaatatttagagagcacctcttacgtgctgggtcctgtggttgttgctgcagttacagacatgaagaggcaggaatgagctcccaagccaagtatgcaggattgtgtcatttctcgttccatgctttttgctaatcatgtctgggggtttataggctgtgtctacatttgtgtggtttcctagagatttcaaatattaaaaaatatccaaaccccttcccattgccttaaactcttcccttaattcatattccagaattggcacagggaaaaatggatctcttctttcccccaggaaaaaaaccccacaagcttatagttatggtaaattaattggtgaatattcttcattaactattctgtatcttaatttttttccctgaaaaatgaaaatgttacttataccactgggagcattttgctgattattagtatccaaggtataaaattttttgagattctgggaacaagaactcccccatggagagattaaactaccttctcttatacattatagagtttactatcttgatttatttcttcttgttgatctctaatccatccaataaccatagccactagtaattgtgaatatctttttattatatcgggtttcttgtaactttgaggattttgttttagtaaattaaatatattatttgtacatgtaattttgctgcatagaacaactggatttctggataagtagcttgaatgttatgtcctagagaataggagtttattacttgctaatatggcttattacattctgatgaatattttgactatgatctgagttgaattgataggaatacattttcgaagtacttaaaaattatttatggtggttcttttgtagtgttttcctttttataaaaccacactgtctgagaagaactctcttacttctgtgtcttaacttgtgggaacaatttatttatttatttattcatattagagatggggcctcataatgtttcccaggatggcctcaaacttctaggctcatgggaccctcccgcctcagcctcccaagtagctgggcctacagatgcccactgctgtccccgactatctatatgaattatctttatcattgaaaatttaggccaggcgaggtggcacatgcttgtaatcctagcactttgggaagctgaggcaggtggactacttgagcccaggtgttcaagaccagcctgggcaacatggtgaaatcctgtctctgtgaaaaataaaaaaattagtcaggggtagtggtgcacacctgtggtcccagctactcaggaggctgagataggattgcttgagcctgggaggttgaggctgcagtgagctgagatggcaccactgccttccagcctgggtgacagagtgagaccctgcctcaggaaaaaaaaaaaagaaaaaaagaaaaagaaattttatcaatgtgtttgtgctggtgtcagtttaaagcctatagagagtcttggaatttatgggatgttgaatttttaaaaattcatttgtattaagtggactttttataaaagagtaaatacctaattaaaataatattttatctgatgttaccaaagagttcttcatttcaacgttccatccctgagtaagttaacttatgaggaatgaattatattacctagcaacctccatccatcttaccacattgttaaaagcctatattctgcaaataattcacgtaatgaaacaataggcataaattaagttatacatttaattaacatatacataattaaattatatataccaagaaacattaaacttttaaacaattataaccaaattcattgctcatttcttctaaatcgatatttacatctttattgttaatttctaagaaaagccttaataagaaaaataacctaggagtatcttgaattagcaaatgtatgttttatagaaattctacattttatagattctatcactgcttctacagtacatacatttttatatttatggattcattggtatcctataaatagcctggatttttaatataatttatactactagagtataaattatactctagtataatggttctcaggtgcgcatatcagaagacaaacacagagatggttgacattgacatatagcagacttttatccccctaaaaatgcattttttttagcaggttcaaaattggaagcatgaattgaaacaacacagaaataacatgtttgcttacagtggataaattttgtactattttatagaaaacctctacaaatttaagacaagttaccgagcttgttgacaagttatgaggccatatgaaaagcaaacacacaaacaacaacaaactaggcactaagaaaaagtaaaaggaaattaaagttggtcattgcaatttaattaagacaatagtttgaatgcaaatgaagacataagacaaattcaatggaacattagaaattgtcttgcttggtactgtagtttatataagcagaagcggagacatactgaggttaagttttcatccaaagtcaccattagattgtggcagagctggctcctgtctcttgttgagtcttcttttcactgcctgacattgcctcttataaacaggacatggtgccagttaattataattgcttaagaaaaagcaattgaaaaaatggtgaatggtaattacatatgggctgaaataacattgatataatcaggaatatttgggggaggaaacaccattctagaacatctatttcaaccttggcaagctggaatgacaatctgcaactttatttttaccagttatcacttactggtataatgaaacaaatgctaaccgtaaaatttaattattaaatcaaatattaaaataatttataaacatgtttaaatcacattgcacaaaggaaagaaaaggggttgtatcattttcaggcataaaatcatttccttcttccttttaatttgatgttagaccagcttttttcatagtcaaatttgtacggaaatgcccagagagggcaaacaaggagcttaacagatgtcattttgctattctgtgaagctaaatagaactgtagtttattgaatgatttctcttacttctacttctgcttgaatgtagattgggggatggatagtagctgagtccaatttaatttgttcaattactcaccatttgatttatttatatcatatgataaattaatcagtttgttttaatctatactctgtatagggtttacaataagaacatcatttaaagtatggagtgcaactcttacaggttatatatattcattttattttacgaaaatttaatgtcatatacttatgcatttaataatatataccaaatatttataacaattcatcaagcttgacatttttttaaacaagaataaaatttcaagaaagttggaagaaaatacaaagaatttttgctccctctcctcatccatttgaaagcaaattgccaatacgatgccttatgaccccagaatgcctcggtagattacaaatgaagacactatcatacaacaaaatacaaccattgaaatcaggaaattaaccttgatattattaacatcaagcttgccagttgtgtagaaagaggatccagtttagaatcatgggctgcattttactgccctgtctcttaagcatttgtaggctttggaaagtttaaattttttcttgagtttcataaatttgacaattttgaaactcatagcctagatattttgtggactatcacttaatatggatttggctgattttatctcatgattaaatccatgcatctttggcagggatatcacagaaataatgctgctccctcattgcatgctgtctgtggtgcatgactgtgacttgttcagttactgatgatgcctctgtgataactgggttaaagtggtgattgccaggtttcttcacagtcgtttactctttcctctttaagaaataataagtatttcatggtgaagtactttaaaactctgcaaacatctcattcctcttcaaactttcatgttattcatttctttctttatatcttttctttttcttttctttctttcttttttttttttttttttttgagacagagtttcactcttgtcacccaggctggagtgcaatggcatgatcacggctcactgcaacctctgcctcctgggttaaagtgattctcctgtctcagcctcctaagtagctgggattacaggcacccaccaccatacccagctagtttttgtactttttgtagagacaggatttcaccatgttggccaggctggtcatgaactcctgacctcaggtgatccacctgcctgggcctcccaaagtgctgggattacaggcatgagccaccacacctggcctctttctttatacctttatagatttgtggtctacttatttaatggactaaaatccactactatgattatttattttaatgttccaattgttgctgtgggcaccactttgattgcttttataatcttttgatatttctctattattctttaagtatttcctgactttctggtacagcaaaagattctaggctcattttgtactttttctttcccatccaggaattggtcattttgctaaagggtcctgtttctttgtaacgagaatagtatttagaagccaagatttggttgctaaatgtactcattactcttggggtgccactgcctccagactgtttcagaggacaaaaactaaggaatatataataatatgcagacatgcacccatatatatgttacttatatgtctacatttatatacatttataaattcataccaattccttccatttcagttcaataccattgagttcattctatttttctttcatttcaatatttgtagctttcttctctgacagttgagaaacctggtttgccaattatactgaatatatttatttatttcatcacacctgtttccctccaacagtccgctatatgtggctaagcttccattgccattctactctccaccatccacgggtgctgttgcattctgcttaggctctgctggcctcggccaggccatccctccatgaagatgccgtctttttttctttttttgagatggagtctcgctctgtcgcccaggctggagtgcagtggcacgatctcggctcactgcaagctctgcctcccagattcacgccattctcctgcctcagcctcccgagtaactgggacggactacaggcgcccaccaccgcgcccgactcattttttttttttttgtattttcagtagagatggcatttcaccatgttagccaggatgatctcgatctcctgactttgtgatccacctgccttggcctcccaaagtgctgggattacaggcatgagccactgcacctggccttgttatggtgcctttttatttctttgctcctaagaaatagtcctggactttgtgatgctaccttactgtaacatcaatgttaatgcttttaaatattttccacaggtgttaagtcatttattactttactaagtcacagagtgccatacattttatatgaaggatagggatccatttcctcaaattataactgctagtaagacagaagcatagtgtgatggtttattttaggtgtcaacttgactggattaatggatacctacataactggtaagacattctgtctgggtgtgtcacaccaatctcttagatggactaaaccgggaagatccaccctcaacacaggtgagcaccatccaatcggctgggggaccacatagaacaaaaaggcagagaaaaggtgaatttgatttctctctcttctggagctggaacaccctcttctgctgcccttggacatcagaatcccaggttttccagcatttgggctccaggactcataaaagaagcagccctctgtgtaatcaggctgtaagcctcagactgagagttacatcgtcagcttcttttgttctgaggctttctgacttgggctgacccgtgctgccacctctcctgattctccagcttgcagactccctatggtgggacttcttagcttccatgatcatgtgagccaattcccctaataaatttcctgttatctatgtaactatctgccattggcatccaaaccagagtgattcactcttcaataaaggctgaatgaagtgagaccttctaggttacattcccaggaatttaggtactcttggtcataagatgtttatggttgaaggaacaagttaattatgctaattaagacccagaacttaaggaaatgtcctgatatccagatatcttaagaacagaccaggcaaggtggtgcacacctacaatcccagcacttttggaggctgaggcaggtggatcacttgaccagactgggcaatatagtgcaactccatctctccaaaaaatacaaacattagccaagagtgatggcacacacctgtgaccccagctacttaagaggttgaggtgggaggattacctgagtatggggacatccaggctgcagtgagccatgattgtgccactgcaccccagcctatgcaacagaataaaaagcattcttagtttaggaataggtttcgctttaaagattatagtacatccataaattcttgctgatatcaataggtaaacaaaagaagaacaatactaatagactgttacaagctaatcacaagcctttgtataataataaagcacattattcttagttctaacattgtatataagcaagcattatgtttgacgtaggggcgttccttctctcgctttctgaggatgccctactctgtaataagagtagtctctagtaaactatcttaatttcactctactctgctactcacactgaagtcattcctgtctgaaatccaagaacccactcttggggtctgggacaagaccctttttctagtaacatctatctatcttctatctatctcccgcctattggttctatctctttggagaactctaatacacacagtaaagttaagattaacacacagaagcaggtcatggattattcaggtggaaccacaggggacatttggttgggattgcatgattaacgccctaccatgtcatgtcattgatcaatggtcacttctttcctgagcattagcatgtctctaagatttgctcttatctatcaaatgaatgcagaatgccattcatgtgataaaccccaacaggtcccacagaattttcacagtctattgtgtcaagttgtacttaagagagattttttactttatggatcaatgactggatagatcaaaatgaatcctttaaagctatcatattttatcagtttgctgcagttgtcttgcaggctcaatgaaaccatgtttcctagagtccaaaaatctgggaggtgaccatcgactcttctagatgagctggtgttctctgcttaactaactgctcaagttcattccatgagggagaaacctccctttttgactttgaataccactgctgagaattgtgcttctatttcactttgtggaatgcttgaagtgatttttacagaattctttttggaaatgttaatacttgtggaacaaatggcttattgttaaacttggagctggaagacctggatttgaatgcggatattgccagttactagcagtgtgacctcagtttcttcagtaaaacaggatattatcattgtctgacaaagttttttgggcctcagttaaaaaaatgttaagttaaagtcatttcggttcttgaaagtgccaagcaaatgtgaggcactattagtattttgtaaaaagccatttctttaaagggaagacaattcatgaagaaaaaattcaaatgaaagcaaagtaataaataaaattaccgtaagaactgatgagagaattctgattttgtagatggaaatttgtttttgaatttaatgaatatacatatatttactcctttaagtagttattttatgtttcaaaaagattcaaacattttaattgcaaaaagtctttgccttgctttaaaagcaagtttaatttcagggacaatacacctattcattacccaaaccattcctaagcagtaacagccttaagagcctattaatgtaagggggggtgttaagtcttattcaaaatgaattgaacccctgactccaagtcagctagtttatattctaagacaatgaaaattaagaacaatgatttagcgactcgagaagactcaatctaatatgatccgaaaaaggccaattatcgtaactcttttagccaatattaacttctgaatgtgtcaaattctccatcttggaaaaactgtgttgactccagcagacataagaagttttcttctctcattaacaaaccttctatgttagaccagaggaagaagcatttaactggcattattctaaaaataatgaaacaattcaacaaatacatattttataatgattttgtattaaaatagaactggttttacttaattggttgtaatttaaagttcaaaatcttaaaaatatatttgttgtaaaaatgtcaccaggttctgtgttatctcttttcaattttccttgaaagagttgctcattatgatatttaaattcttgtgtcttacatttgaaaattagtactgatttttcaatacaaaaaatcctatcgaaacagcttgaaatcttagcagtctttgtacttttcataacatattttattatacatattttatatacaaataaataattaaaaatatataaattttatttttaatttttttgaaacagggtcttgctctgtcacccaagctggagtgccatggcacgatcttggctcactgcaacctccacttcccaggttcaagtgattcttctgcctcagcctcccaagtagctgggattataggtgtgcaccaccatgcctggctaatttttctatttttagtagagacggggtttcaccatgtaggccaggttggtcttgaactcctgacctcaagtgatccacccgcctcagcctcccaaaatgctgggattacaggtgtgagccactgcatccagctctgtattatatactgtagtagtctgtacaaacaaaagcatgtatagaattttggcattcatgttgaaaatatgaccacagatttcttcttaggtacatgggaagattgccttgtattctagttttaggtttcagcaatttcaccactgaccattttattgaaatcatgtagtgctgtaggtagtcagataatgagatgccacttaaaaggcctgaaatacttggggttgcataatggggatgtatgtactacgttagaggctaattccaaaatttggggaaagactaataaaatgtttctcttgtcaactgaagaatgatgaggttcataaatttagaaaggtgagctttgttttttataaagaattgcagccctcgggtggccattctgacagggttggaagtgtagcctcctgccagaagccagaaaccggcactttgagggagggaagaataagacaggaatttatgctgaatgcggtggttgaatatacatttttgtttgtttgtttgtttgtttgtttagacagagtcttgctctgtcacccaggctggagtgcagtggcacaatctcagctcactgcaacctctgcctcccaggttcaagtgatactcctgtcacagtctcccgagtagctgggattacaggcacccaccaccacgcctggcttatttttgcattttttaatagagatggggtttcaccatgttggctaggctggtctcaaactcctgacctcaagtgatccatctgcctcggccttccagttgtttgtttttgaggcagagtctcactgttgcccaggctggagttcagtggccccaacttggctcactgcaacctctgcctcccaggttcaagtgattctcatgcctcagcctcccaagtagctggggttacaggcgtgtgtcaccaagcctggccaatttttgtatttttagtagagacggggtttcgccatgttggtcaggctggtcttgaacttctggcctcaagtgagcctcccgtctcagactcccaaaatcctgggattacaggcatgagccaccatgccccacctgaatatacatatttaatcagctataggaaaaggcacaaatatacgaaaagagaaacgtgcacatagttgagcttcatgcctgtccatgggcatcatgttcaaaatatggtggcattagtataatctgaggatggagttttcagccctctgactcaaaaggtgaagcaggcaacacaaaaaccctcactatgcatcctctataaaccggccagagccacttcatgttcggtgttcttttgtcaggaaggaaagctgagtggtcgttttgtcaaaactgcaaaaggaaggatagtcacaaggttggtggaaatcactggcggagccagtctttcccaatggctggtttctgtttaacccttaagaaagaaagcctcatggctgttagcaaggttgcaggggaggtgaacgaggcatgttcaatcttccatgtcatcatggccaggagcacagttttcaaggtttctctgcagtaccctttgccaagagagagttctattcagctggttggggggctcaggattttatttttatttctcactcttaaggggaacatcaacttagagggtcttgtccatgagactgaaatgtcttccagttgtcttcgagaagaatgtcctcatttgagtttccctgaaagcagagggcctgagacaagtatgtgggctcaggtagtttctttgggaattaatcccaggaagcagaagtgagagagtagaggcatgggaaaacatggagttattgagctagctacccctgtggaaaactggggctccattctgttgaagagcttctaagaaactttgtggaatccctcagacatgtttcagggaaggacagggagactgggacacccgtctattaattcagtctcccattgattgtgggttttgctagaggcactttggcaccatgcacttccaagtgtgcctgtttaggggagaggcaggctgagttgctttcagtgactgcagagaaatccaaattgtgagatgccacagcacagcttgaggtgggatgctggttgcttgcacagacttgtccttcgcagcagtgctgaaatctagtggccaagggaagtggttgaggcaccacaagtgtctgctacagataagagaaagcaaatagtataaaagaagttattatccaattatttctaatagagttgagggagtgtcattgctgtagggtcatggtctgtacagagtggtgtatgagatgaggacgtgctaccccaaaatatgcctctttggcgtaaagattactttgagctgatcatttttagacactagacacaagagaagttttgaaaacacaaacatttcccttttgtaagggaaacttacacctataaagaaaaatgtccatttgtaagtgtgtctccctctctgtacgaagaagggaaagatgattaaattactagagacccacccacctaaatctgcataacaagccttactcttatttactgtgctgtttccagtcacatccccattactggccttcccaacacccttctttctttgtttcagcagaagatggtgcttaagcctgaattctaagtcacctcttggagatttgctcatttctttgggtatctcccagtatacatgaggtatatatgttattaaacttccgtttgctatactatgcagccataaaaaaggatgagttcatgtcctttgtagggacatggatgaagctggaaaccatcattctgagcaaactatcgcaaggacagaaaatcaaacgccgcatgttcccacccataggtgggaaatgaacaataacacttggacacagggtggggaacataacacactggggcctgtcgtggagtcggggtaggaggagggatagcattaggagaaatacctaatgtaaatgacaaattaacgggtgcagcaaaccaacatggcacatgtatacatatgtaacaaacctgcacgttgtgcacacgtaccttagaacttaaagtataataataaaagtaaataaataaataaacttccgtttgcttttctcttgttaatgtgtcttctgttacaggggtccatctcaactaagaactctgaaagttagaaagaaaattatttttccttccctacagtttaaaatgagagttaaaggcattttcttgtattacacagaagaaggagaatgctgtgatttttcttgattaatgttgagtatcgaaatggatgtctttctataatgactggagtctaattagctatcctgatttgaagaaagcaggttttcagaaacacagtgtcatatgttcctcctaagttcattaagtaaccagtgatctgcaatttggtatcccagatggacctaccctcaggaagtgaatgtcctgtgcaaagggctatttttcagataaagctcccaagatatggaatagtgttgtagaaaaaaattgggttcttgtcatgcgaccaggaaaatttagacatgcagatgcattgtagggtgagtagggcaggatttattaagtgaaaagaaaatgggaaagaggaactctcagcaaagcgagagagagtcctgccagcaggtctcttgcctcacagattgaatcccaggtcaccacccaggaactgaagaggccaggctcctccccgctgcaaaaggtgcagacttcccaaggctccgccctcgtcctcccggtgcataggtggacattattcagaatcagtcgggaaagggcgggtttcatctgggaccagcagtttggtttttcagccttcaggctgttttatgcttggaggtggggaccctttcgccggggacccatggctggcttctgtctctatcaatagcatatttgagtgcagggctgaggcagcctcttggaggcttattatcatgtatcaaattcttaccccagagaaaatcagagttgtgatttgaagcgttattagggtaattgcatctgagattttgaataatcatcaacagtcacctaatctgcatcacttattttataaaaaggctaatagacattaataatttacctaacatcaaatagtttgtgaacagacaggctggaactcttcagactggaattcagttcaatactctgcaatggcatcatagataatatgcatttgtcaatttgcataatcaatattttatttttgtaccatgcaggatcattgtttaagtacacagtgatatacttcctgacctttagaattttaaatcactgggcttagtgaaatcccccaaacacatttaaaaactcatagaaaggcatatgaatgcaagcatttggagtgttctgaataccaaaagccaaaaccagtacaggtaaatgacaagcatcacttaaaaagaatgtctgaacagctggctgaataaatcagccaaagttgaaacactcttttcacttgtctgtgaaatttttcttcctagaagtgagggagtcccttgagggaaagaggataacaggtaagcgtattcactgtttgccacttctagaaataaaatgctgcgtatgtattcatatgtatgatatataacacacaactaaacttttttttttttgagacaatgtctctctttgttgcccaggctggaatgcactggtgtaatcacagctcatggctcacagcccacctcctgggctcaagggatcctcccatctcagccttccgagtggctgggaccataggtgcacactaccatgcctggctaattttaaaattttttatagagatagggtcccattacgttgcccgggctggccttgaattactggcctcaagcaatcctctggccttggcctcccaaagtgctgggattacaggtgtgaaccactgcacccaaccacaagtaaacttttgaatccaaggagacacatggtgtggggtccagactgctgtgaccatcctatgtcaggacaagtctagtgcttcactatcaaagacatttctgaaacatggcctgggcttggtggctcacgcctgtaatcccagcactttgggaggccgaggcaggcagatcacctgaggtccagagttcgagaccagcttggccaacatggtgaaaccctgtctctactaaaaatacaaaaattagcctggcatggtgacgacctcctgtaatcgcagctactagggaggctgaggcaggggaaacgcttggacctgggaggtggaggttgcggtgagccaagattgcatcactgcactccagcctgggtgacacaatgagatactatcttaacaaacaaacaagcaaacaaacaaaaaatgaaagaaagaaagaaagaaaaagaaatttctgaagcagaataaaacaccagccactgaaattggatttaatataagtgctttgtgactttggtttatacttttgttgctagggacatggaattttcatttttacctccagcttggaaccagccataagccagtgtctcctcatggctagctaagagcatttcctagtctgtttgggaaggagatagaacctcattttcctttctacattccctatgaggcactcaaattccttgaaatcatatttcccaggaatcacaaatgaaccaatctaaactctgtggggatgatagactttcttgaggtcctctggatttcctaggtccaaggattggtatttgtggtagtgggtgatgcccaagggtgaaggagaactgttactatattcagaaccctgagagttcattctgtccttcacttgaaggaaaactatcaacaggtaacagcaccccttagacttgctccttcttctgtggatgcccttttctggccatgggcacttgaaggaaatgaatgagagacccaggacataggcgctggggaaggagtagagattgatgtcagctctttcctggaaaggttaacagaaactacagggcatgatttattgaaataatctgggtgaaaatgcttgtatatgctaatcttattttttattttattttgttttatttttgagacaggctctccctctgtcacccaggctggaatgcagtggcatgatcttggctcactgcagacttcgcctccgaattcatgtgattctcccacctcagcctcctgagtagctgggattacaggtgcgtcccaccacttctggctaatttttttttatttttttattattattttttttttagtagagacagggtttcaccatgttggtcaggcttgtctggatctcctgacctcaggtgatccgcccgcctcggcctcccaaagtgctgggattacaggtgtgagccaccgtgcctagcctaatcttatgttttaatttcaaatattatttttataattaatgttcacatcccttatttattgaatgaaaacaatgcaatgggttagataagtgctagaactaatgctctataataaactctaaaaaaccctagccggctgggcgcagtggctcatgcctgtaatcccagcactttgggaggccgaggcgggcggatcacaaggtcaggagatcgagaccatcctggctaacacagtgaaaccccatctctactaaaaatacaaaaaattagccgggcatggtggcgggtgcctgtactcccagctactcaggaggctgaggcaggagaatggtgtgaacccgggagacggagcttgcagtgagccgagattgagccacctcactccagcctgggtgacagagcgagactccatctcaaaaaaaaaaaaaaaaaaaacaccctttcttggtggaaaacgtcaaaactatttaaagggagtgagaatagtataacgaacctgggtatgcatctaatctagctccaacaattatacaatatcagttcacagccaattttatttgatctatatctctctctgtccctcctcaaattatttcgaggcaaataccggacatatttacatttacctttaatcttttcttttcttttttttttttttagatacagggtctcactctgttgcccaggctggagaacagtggcacgatcatgcgttattcactgcagacttgaactcctggcctcaagcaatctttctaccttgacctcccaaagtgctgggattacaggtgtgagccactgtgtttagcctagacttacctttaatagcttttgataagttattttttaatgtaattttgataaaataattgtacctaaaatgtactaatgtgttggtattgtctactatccaatctacgaacaaattttactgattcattcgtaactgaccccagagttggtttgtttgaatcactgtaactgagcctctattataaagatcatacgatgtttgttttacctactttccctttccccttgtccttttcttgctctatgcgtgcttgcttgcatgtcattatttcagtagagggtagtcactaataattgattaacttcatatcctaacctacaggggtgcctggcagattgatgaacttgtttttcttttaaagaaccatgatccttaggttatgcagacctccttgatggtgtccagaaatttgggtagagggatgccaacagctttgatcactgggggagtttcatctcccatatacccaccttactcatacaagtccccagttaaattcaaaggcagggcagatttgagagactgtctctcctgccctcttgctttggtcaaattgaataaacctttctctgttcctgagtgctgatgtgtcagtgtttggcttaccatgcatcaggtgcacagacctaaatttggagattctgtaacatcaagacccatatgacgttcacatactggattaggctgatgactcatatatctctcttttaatgtgtgaccatttacatctctttctctctctcctcccttttttttttttttttggcaatttctttgttattaatggtcttgttttaaagtgaagtattgtcatttaagtttatatatcaatgttatcattatttgtttatttacaacaaagttttatgccaaggcagtcatgccattacccacctgacctgcttttccaccatcagttttacctgtgtgtgtccctggatcatcaggaagcattgattgagaatctttttctcttaatctgccttactattttctaatgtagttactgatcaaacttagcagtaacccactcattttgtgtgtaggcaaaagcaactatgaataaacagaagaagtctcccacagtgggtaaatgtgtggacctgggtttgaaacctgatgaaacttgctggctgtgaccccttgggccagggattaactgctgtcactcttagttccctcaaccctcaggtgcatgtgattatattcactgcctgatatggtttggctctgtgtccccacccaactctcatcttgtagctcccataattcccacgtgttgtgggagggacccggtgggaggtgatggaatcatgggggtgggtctttcctgtgctgttcttgtgatagtgaatgtgtctcatgagatctgatggttttaaaaacgggagtcctcctgcacaagttctctctttgcctgctgccatccacataagatgtaacttcctcctcctttccttctgctgtgattgtgtatcctccccagccacatggaactgtaagttcaataaacttctttcttttgtaaattgcccagtctcaggtatatctttatcagcagcatgagaacagatcaatacagtaatttggtagcaggtagtggggtgctactctaaagatacctgaaaatgtggaagtgattttggaactgggtaacaggcagaggttggaacagtttggagggctcagaagacaggaaaatgtggaaagtttgaaactccctagagagttgttgaatgactttgaccaaaatggtgataatgatatggacaatgaaatccaggctgaggtggtctcagatggggatgaggaactttttgggaagtagagcaaaggttatgtcttgttatgtgttagcaaagagactggtgggattttgcccctgacctagagatttgtggaaccttgagcttgagagagatcatttagggtatctggcagaagaaatttctaagcagcaaagcattcaagaggtaacttgggtgctgttaaaggcatttagttttataagggaagcagggcatgaaagtttggaaaatttgcagcctgacaatgcaatagaaaagaaaatcccatattctgaggagaaaatcaagctggctgcagaaatttgcatatgtaacaaggagttaaatgttaatccccaagacaatggggaaaatgtctccagggcatgccagaggtcttcacagcagcccctcccatcacaggcctgcaggcctaggaggaaaaagtgatctcttgggccaggcccagggtccccatgctgtgtgcagcctggggacttggtgccttgtgtcccagctgctccagccatggctgaaaggggccaacatagagctcggattgtggcttcagagggtgcaagctgtaagccttggcagcttccatgtggtgttgagcctgccagtgcacagaagtcaaaaattggggtttgggaacctctgcctagatttcagaagatgtatggaaatgcctggatgccctggcagaagtctgctgtaggggaggggccctcatggagaatctctgctagggcagtacagaagggaaatgtgggatcggagccccagcacagaatccctactggggcaccgcctagtggagctgtgagaagagggccaccatcctccagaccccagaatgatagatccactgacagcttgctccatgcacctggaaaaaccgcagacaacaccagcccatgaaagcagctaggcaggaggctgtaccctgcaaagccacaggggcggagctgcccaagatcatgggaacccacctcttgcatcagcatgacctggatgtgagatttggagttaaaggagatcattttggagctttaagatttgactgcccctctagatttcagacttgcatggggcctgtagcccctttgttttactcaatttctcccatttggaacagctgtgtttacacaatacctgtacccccattgtatctaggaagtagctaacttgcttttgattttacaggctcataggtagaagtgacttgccttgtctcaaatgagatgttggactgtggacttttgagttaatgctgacatgagttaacactttgggggactgtttggagcacatgattggttgtgaaatgtgaagacatgagatttgggaggggcaaggtgtggagtgatatggtttggctctgtgtccccacccaaatctcatcttgtagctcccataactcccacttgttgtgggagggacccagtgggagatgattacatcatggggctgggtctttctcttgctgttctcatgatagtgaatgggtctcacaagatctgatggttttaaaaacgggagtatgcctgcacaagctctctctttgcctgctgccatccacataagatgtgacttcctcttccttgccttctgccatgattgtgtggtctccccagccatgtgaaactgtaagtacaataaacttctttcttttgtaaattgcccgctcttgggtatgtctttatcagcagcatgaaaatgaactaacacactaccttagagtgttagtgtgaaaagaggcaatgtttgaaaatttttagcttggtgctgcccacactgtgagcattcagtaattgtgagctgtaatgctcactgttgtgttccattcccacagtaatttttgtgtatgtgttttgattttttagacttaaaaaatacagttttagatttatagaacaattgaacagataatacatagagttctatacacccaccccatccctacctctcaatttccctccacaatttcccctattattaacaacttgcattggtgtggtacatttgttaaaattaatgaaccaatattgatacatgattgttaactatagtccatagtttacatgagggctcactctttgtgttgtgtacttctatggttttgacaagagtataataacacatatccactgaaagggatcagaatatgctaccccaaaatattctactttggcataagaattattttgagctgaaggcaatttagaagcagcagactcaggaagagctctctgacctctcttttctgcctaaaagcaggggataaatttcccttttcccatactgaggagaggagaatgattctccattcttacaaccagagagaacttgagtttgtgtagcaaatctcagtaaacagcccttatctaccatgtacttcctagtcaccttctcccaatttaccacccctaggaacccaagctccccatttcttttgtctagtcatgtctccccgagttatcatcctttgctaaaatggtgtattagtcccttttcatgctgctgataaagacatacgctagactgggtaatttataaagaaaaagaaatttcatggactcacagttccatgtggctgaggaggcctcacaatcatggcagaaggtgaaagatatgtcttatatagtggcaggcaaaaagagagagtgagaaccaaacgaaagggtttccccttataaaaccatcagatctcatgagacttatttagtaccatgagaacaatatgggttaaacccatgattcagttatctcccactgggtccctcccacaacatgtgggaattatgggagctacaattcaagatgagacttgggtggggacagagccaaaccatatcacatggtatataagccccagggtctaactacctctctgagttttcagttctcttctatgaagcccctgtggacataaaattaaaaataaactttgtctgcctcttctctgattaatctatcttttttcagtttaactcttaaattccagccacagaaactaagagggtagaggaagtttttcctcccctacatattcattatagtttcatacagaacaatttaaccaccctaaacataccctgtgtacctattcatctttctctccctcccttaaaatctctggcagccactgtctttactgtctctatagttttgccttttccaaaatgtcatatggctggaatcatatagcacgtatcttttttagtctgctgtctttcacttagcgatatgacttaaagtttcatttaaaaaaacgcatgtgatttgtagttaatggaaaggattacataaagcacattttatgtgaagacatgggagttgcttttgatatttttacttccttgattcaatatgagactgattagagggctttctcttccagcactgaccagagggtagaaagaaaaacgcgaggattctggattctctctttataagcacattgtttatggttatagctcatccaggttgagtttagtgcagtggctcctacagctgatccgtgaactagctgcaacctgaaaatacagattccttcatccctgggagtttgtgactctggagcactggagaaagacccaggactgcatttttaatgggcttctcatgtgatacttacttatacagaaccatttctttggtagtaaaaaggaataccggctttggtctcagaggatttggcgtcaagtcctctctcttcattgaagcaccaaatatttatttaactcctcccatgtgccagaccttggaccaggctctggattgatacaacagtgagcttaatagtcatgctttctacccttcacaagcttacactggagaagaggcaggcattaagtacacaattacagaaataaatcttattcatcaactatgctaagtgctaagaaagaaaatacaaaatgctatgagagagtgttaaaaaagggatctggctttgtttgaaatggggtcaatgattcacttttccctgagataatgactttgaactgagatattatttacgtgacatgagggaaagatgtctgccacccgggcacacgaggtccatttggcttggaacacaaggagagacagagatgaggctgcaaattaaccacttgatatctgtccttctgcagatcaacagccagggtcactgggtgtctagctaacctcctactcaactgcactgaaatttctcccaaatctccaaaacatgtttagtaattctgccagttatatttatcaagagcttaaacaatcagattgttaatagccttttcttaaaaagtgttagaattttagttgttagtgaatgattcttaaaaggctgttctgtctttgggttagggccaattgttcatttactgaaagatatacacggaaaagaaaaggatctgattctgcattgccactacttaagcgctgtgaaatgcttgagcttttgtcaggtgtctgtagcctcatttcatcttcactgtagacttgtggaaatgcattattatgacgccaattgtacagatgcagaagtaaaggctgagagaaatgtagaggttcactgcattgacatagtgaggaattgattgcagtggttggctgtcagggaacagtcaatgtccctagctaggacaattttaatactaccattgtgtcagttttgggccccagttatgcattctcttttggaagacatacaacctggacatacttatgtgaaccccgaaaatctgaggcaggtctcagttagtttagaaagtttatttgccaaggttgaggatgcacgcccatgatgcagcctcaggaggtcctgaagacatgtgcccgaggtgatcagagcacagcttggttttatacattttagggagacatgagacatcaatcatcatatgtaaaatgaacattggtttagtctggaaaggagggacaaatcgaagcagggagtgggcttccaggtcgtagataagagacaaatggttgcatttcaagtttgtgattagcctctccaaaggaggccatcagatatgcgtttatctcagtgagcacaggggtgactttgaacagaatgggaggcaggtttgcctttagcagttcccagcttgacttttccctttagcttgatgattttgggggtccaagatattttccttttctttttttttttttttctgagacagagtcttgctctgtcgctcaggctggagtgcagtggtgcaatctcagatcaccgcaacctctacctcccaggttcaagtgattcttctgcgtcagcctcccatgtagctgggattccaggaacgtgccaccatgcctgactaatttttgtatttttagtagagatggcgtttcaccacgttggccaggctggtcttgaactcctgacctcaggtgatccacctgcctcggcctcccaaagtgctgggattacaggcgtgagcctggcctttccttgcacacttaacatcccaggatcttacttaatgctgggaatgaggttctatggaggactcccggtgttttttctcctgctctccaaagccaaccaagatctcttcagaaatcttcagctcagcccaaaggagaaacttccaaggtaaaagaattttcctaaaagtataaatgatattaagaattctgcccatatggactgggattatgctttatttcctgatgggcctttttcaaaataaatcatgttcctactctccatcttagcagatgatgaaggcaattgctgctgaaatggaaccatgtggtaacccctgcattaaagcaagtgtaggtttattacatacattggacacagtaggtgacaatgtagaattatttattttaagggtacaagaccatttaccttccttcctcaatatccttcttataccttattatagtgctgcactttacactgtaagaatcattccttggaatttgtaaggccctgaatataaaaagccactgttaaaatagcatgctacctaagaaaagtaacccattaacatccattaaggcttaagtgttaattataatcatgaagtttgaaagttatggctaaatgatttattattcagaagccaaagccttctagatttgtttgactccaaggatagagtcaaaagttcaaacgattctaataatgcaaaaatatcaagaaattatggaatcttctcattccacccttcctctttatcttaaactgctactatttcaaaatatatgtgttagtcatgccgattactgtgaggttatcaagggtagtcttcaatatagagcctttactttcttttcagagctttatgggagaactggttgtcttctatgttttcccttgagaattttgcttatctgttgtgtctgtcctaaatgctacagtagttggtctcagactgagctgtgtttttgtacactgtcatggacagtagcatttatgaagcattttttgcatacaattcttgtctttgatagtgattatattttgtattttaataaattatcctgggctgggtgtagtgcctcatgcctgtaatcccagtacgttgggaggccaaggaaggtggatcacttgagcccaggagtttgagaccagttgcagaaaccccatctctacaaaaaatacaaaaattagcagggcgtgatggcacatgcctgtagtcctagctactcaggtgggaggatcacctgagcctggggagatcgaggctacagtgagccaaaagcatgttactgcactgcagcctgggcaacagagtgagaccctgactcaaaaaaaaaaaaaaaattaccttgaatttttctttaaaaaataaaacatatttagaactcaggttttctctcgttgaattctaagtcctattactcagctgagtttttttatggccttgttgaattgtcaacagagacagtggattactgattcatcaagtatatattctctgtagcaggaaaatggaataaggaatgtacttgcatttccacattacctgacaccatcattttaactttattcattaactttattttacggtgtgtgagactcaaaacaaaaatctgccattagttccagtttggctccaaaataaaatattactttgttcattcattttcacatgttgtattaaagtgctgtcactgggctgatgctatgatcctcaccggagggaaatggatggagcacattctatggaggacatagagagaaatctggagcataaggaaaagggccaggctacgttgggttggacatctcagttgatgatacagggtatccaagaagctttagtttcccacgtatggttaggatctaggtacctggatattgaagatataggaagtagaacataagaaataatttttccagttcacagctttgttttgagaaaggctctgagcaagtaaaaaggagcaaatgcttatctgagtagaacttcaacggtatggcttgtgatagccagtctcatgcaggtacgtccttgggatttaacatatacaggctgggttcagtttagaggattctctagcaatttgagaagccaggaaaacctctcaaaccccttagacccagacagaaagaatcaatgagggaatgattcactcaatgaataattaccaactggagtgaaggattctctagtctagtgattctcaatgaataagcattataccatctctgtcagaaatgtatgtatgttaaaatgcagattcctgggccctacctcaggctaactggagcaaaatttctatgaagtggggtctaagaatatgcatattcacagatatgctagaaggttcttattcatatttacagcagacacttatccttggggatatgtcaaaccagccaagtgggaatgaaggtaaaactttgagcctacagcacaaatgggctgagatattttgggtagagcttcttcttatggataaaacaatagtcacatgagtagcaaaaggcttcataaaatattttgacctccacaggtgacataactttcttttgttgtcaactcctgatttattttagagaaattttgtttttaaaagttctctctgatagataaatgtgctgaggcactgagtgtacttttagttcttgcattgggatgtaatctaataaaataaaattccatgcagctatttggatgacatctgtttgaatagcatagtggggcaaatagatttgtgtctatgtatattatttgtgtgttgtattattagcaaatatgatagtgttagcaaatatgatagtattatcagcaaatatgatagcaaatatgatatgatagttgtatgattagcaaatatgtatattatttacgtgttgtattattagcaaatatgatagctttaataataatctaatattaatttatactacttaattttgacaaagaagtagaattgaagtagagatttgatattaaaggcatttatccatctgctttggagtggcaattggtatatagacaatgggctttagattcacataaatgttggtctcaccttttccatttgctcattgtgtgaccttggcatattatttagcttctctgaatctgtgtttttttaactacaaaaagaggacaatagtacattacttctatgatatagaaaatcacggccgggtgtggtggctcacgcctgtaatcccagcactttgggaggccgaggcaggcggatcacaaagtcaggagatggagaccaacctggctaacatggtgaaaccccatctctactaaaaatacaaaaaaaattagccaggtgtggtggcgggtgtctgtagtcccagctactcgggaggctgagacaggagaatggcatgaactcaggaggcagagcttgcagtgagctgggtaccacagcgagactccatctcaaaaaaaaaaaaaaaaaaaaaagaaaatcactttaaggctgatatatatggtggctcacacctgtaataccaacattttgggagcctatggcaggaggcttgcttgagcccaggagtctgaggttgcagtgagctgtgatcgtgccactgcagtgcagtctgggtgacacagtgagactccgtctcaaagagaacaaaagaaagagagaaagagagagagaaagaaaggaagaaagaaaagaaagaaagcaaaaagaaaagaaaagaaataaaaaaagaaaaaagaaagaaaaaagaaaagaaagaaaggaaagaaagaaaaaagaaaagaaagaaagtaaaaggaaagagagaaatgaagaaaatcagtttaatatagtacttggaacatatcaaatgcttacaaaatttagtgcccttcattgcactggagaagagttaggtggcattttgtagctccgtatgctcagatacagtttgtttttgagctgggaatattttagacttcatcttttctttcttagtcctataattttcctttattcataatgcagtcatccctttcccacccatggaaacagtgaaatgtgggaccagccatgctatattattaattttgcaaagcttgctgacagtgacctctccagcagtagcattcactcttttgccttaaaaaatttcccacaaaagctctccactaggcataagcattactcttagtcctcccactgcttcagtgtggcacagtcatcagtaatatgtagatttccactttggctagggtctatttctctgctttgctcagaaggtaccactgacctttctgattagctgagttgcagatgactgagcttgcacataaaagggacagtcagaaaataaatcttccctgtgtctgtctagacagactccaagagtcaggaaaaattctgctgaaagtccataaatcttccatctttcttcctgaaagcatgtacgagaacagttctcctgtcactacgtatgagagcattcctgaatgtgtgggtagggtttttgatgtcaattttttttatatcaactggtaaaactttattttacaagcaacaggaattggatcaaatgattattataatccagaggaaatattttggaaccacagcaaatgccattatacatactgccaatacagatttaatagacaatactgaactgtacaagagttatttatttttccttaatctcgaagctatttttagtaatacaaaaaagccatattaacatttttttcccgttagaaaacatgatgtacaaaactttggatgaaaagataagtcaaatttcgtttaatcacttggaggaaaatccaccaactctctcaataccacctttcactcgcgtccgtgtgaagagaccaccaaacaggcgttgtgtgagcaataaagctgtttatttcacctgggtgcaggcgggcgggctgagtccaaaaagagagtcagcgaagggagataggggtggggccgttttataggatttgggtaggtaaaggaaaaaggggggttgttctctggtgggcaggagtgggggtcacaaggtgctcagtgggggagctttttgagccaggatgagccaggagaaggaatttcacaagacaatgtcatcagttaaggcaggaacaggccattttcacttcttttgtggtggaatgtcatcagttaaggcaggaaccggccatctggatgtgtatgtgcaggtcacaggggatatgatggcttagcttgggctcagaggcctgacgttcctgtcttcttatattaataagaagaataaaacaaaatagtgtcgaagtgttggggcggcgaaacatttttggcagggggtggtatggagagagagaatgggtgatgtttctcaggattaggggaggcgtgggaacctggagtgggagagattaagctgaaggaagattttgtggtaaggggtgatattgtggggttattggaagaaacatttgtcatgtagaattattggtgatggcctggatacggttttatatgaattgaaaaactaaatggaataagagaaggagaaaaccaggtattaaagttctaagaatggggaggacctaggacatgtaattagagagtgcttaaggagatttagcatagttctgccagcaaagattatttatttaagagttaagagtggcagtttggggatagcaccaggagatatcagctgtgatagcttggagaaacagtgtaaactggcagtgtaaacaagagcagggcacgtatgagtagttgagaacagtgaacaggagtatgactagacagaagatagtagggatgacaagtttttttggggcacagtcttaagttggtctggtgtctggaataagactggggcctaataaaaaggagcgtccatacaggagcttaaatgtgctgtaccttgtaggattccgaggacaggcctgaattctgagaagggaaagtggtaaaagtactgtccagttctttttaagttggtggctgagcttggtgaggtgtgtttttaaaagactattagtctgttctaccttttctgaagactgaggaccgtaaggggtataaaggtttcactgaataccaagagcctgaaaagccggtctgctattggactgtatagaggtgggaaggccaaagcgaggaattatgtgtgacagaggggaagaaatgactgcggtgaccttttcagaccctgtgggaaaggcctctacctatccagtgaaagtgtctacctagactaagaggtattttagtttcctgactcagggcatgttgagtaaagctactttcccagtcctgggtgggggcaaatccttgagcttgatgtgtagggaagggagggggcctgaataatccctgaggggtagtagaatagcagatggaacactgagaagttatttccttgaggatagatttctacgatggaaaggaaatgagaggttctaagaggcgggctagtggcttatactatagcatagcctgcctttgctggtgtggtgattaggcctggtggaactgccatcaataaactaagtgtgatcagggtgaggaataggaaagaaggaaatatggggaaatggggtggaatgtcaggtgcatcagagagatacagtcataggggtcaggtgtggtatcaggaataatgtgggaggccggattgaagtccggaccaggaacaatggtaattgtgggagactcaacaaagagtgagtacagctgaaggagctggggagcagaaagtatatgcgtcaggtgtgaggaagaaaatagctggggagcagaaagtatatgcgtcaggtgtgaggaagttatgagaactgttgagagtgagttgagcatagtttgtgattttaagggcctctaaaagtattagggcagtggtggccactgcacgcagacttgagggctaggcaaaacagtaaggtcaagttgtttggataaaaaggctacagggtgtagtcctggttcttgtgtaagaattctaactgcacaggcctgcactttggctgtgggtaatgaaaagggttgggatttgtcagggagagctagggtgggggcagtctctaaagctgtcttcaaggaacggaaagaggaatggggaaaggatttaggatctatggggtcagctaggtttctttttgtgagtttatataatggttttgttaggatagcaaaaccaggtatctaaagtcgaaagtgtctaaccatgcccaggaaggaaaggagttgtcgttttatagctgttggggtttgagatatcagctgaacaggatcagcagggagagcacgtgtgtttttatgagaattacgctgagataggtaacagctgaggaagaaatttgggcttgactgaagtaatgggggctgtctgtgaagcttgcagcagtacagcccaggtaatttgctgagcctgatgggtgtcagggtcagtccaagtgaaagcgaagagaggctgggatgaagggtgcaaaggaatagtaaagaaagcatgtttgagatctagaacagaataatgggttgtggagggaggtattgaggataggagagtatatgggtttggcaccatagggtggataggcaaaataatttggttgataaggtgcagatcctgaactaacctgtaaggcttgtctggttctaggacaggtaaaatggaggaattgtaaggagagtttataggctttaaaaggccatgctgtaacaggtgagtgataacaggctttaatccttttaaagcgtgctgtgggatgggatattggtactgagcggggtaagggtgattaggttttaatgagatggtaaggggtggattataggtcgctaaggagggagtagaggtatcttatacttgtgggttaaggtggggagatataaggggaggatgtgaaggaggctttgaactgggggaaaaggtggcaatgaggtgtgtctgtagcccaggaatagtcagggaagcagataatttagttaaaatatctcggcctaataagggaactgggcaggtggggataactaaaaggattgcttaaaagagtattgtctaagttggcaccagagctggggagttttaagaggtttagaaacctggctgtcaatacaacagttatggaggcaagggaaacaggcctttgaaaagaaggtaatgtggagtgggtagcctccgtattgattaagaaggggatggacttaccttccactgtgagagttacctagagcgtctgtgatggtcttgtaggcttctgaggcaatccggcagtatcagtcttcagctgctaagctgagaagatctgggaaggagtcagagagccttgggccagagttccaggggctctggaagtggctgccaggtgagttgaacagtccgattttcagtggggtcctgcacagatgggacacagcttaggaggaatcttgggctgtgggcattccttggcccagtggccagatttccagagcttgtagcaagctcctgggggaggcaggcctggaggaatgcctggccactgaggtttaggcgtttagaagttcttgtgtgctggagatgtggctggggtttgtctcatagtggaggcaaggaattgcaactcagaaatatgttgctacttggctgcctctactctattattgtacaccttgaaggcgaggttaattaagtcctgttgtggagtttgagggccggaatttaatttttggagttttatttaatgtcgggaggagattgggtaataaaatgtatattgagaataagacggccttttgacctttcagggtctagggctgtaaagcatctcagggttgctgccaaacgagccatgaactgggctgggtttttatatttgatgaaaaagagcctaaacgctatctgatttgggataaagaaaaaggagcattaaccttgactatgcctttagctctagccacctttttaagaggaaattgctgggcaggtgggggaaggctagtcacagaatgaaactggaagccagaccaggtgtgaggaggggaggtgataaaaggattatagggtggaggagcagaggctgaggaagaattgggacttagcctggcgaggaggggagaagtcagatgagtctgtagaaaaggactattagaaagactcagtgacacctggggttgggactgaggggacaggcaggagggaaagaaggaagatttgggactagttgcattgggaacagagactaaggagggattgatgtgtaaaagaatggctggacgtcaggcacctcagaccgtttgcctattttatgacaagaattatttagatcttgtaggatggaaaaattgaaagtgccattttctggctatttggaactaccgtcgaatttgtattggggtcaagcagcattgcagaagaaaataagacgcttagattttaggtcaggcgagagttgaagaggttttaagttcttaagaacacagactaagggagaagaaggaggaatggagggtggaatgttgcctatagtgaaggaggcaagtttaaagagaagggtagagacgtggagtaggggatggggagcagccaaagcaggcatccccgcaattgacttgccaccaagggaacgtgggtgaatgaccaaggcaggtgtccctgcggagatcagacaccaatggaatgtgggtgaataatcagagaggcatccttgcaatgattaaacaccaagggaaggctgccttcccgagtccatgaccggcaccggagttttgggtccgtggataaaatgtgtctcctttgtctctaccagaaagtgaaaggaattgaaattaagagaagggagagattgaagtgtggtgccaagattgaaaggagaaagaggttgagagatagtgagggaggttggagaagagagtaaaaagaggctgcttaccggatttgaaattggtgagatgttccttgggctggtgggtctgaggacccgaggtcataggtggatctttttcacggagcaaagagcaggaggacaggggattgatctcccaagggaggtcccccactccgagtcacggcaccaacaccaaatttcactcgtgtccatgtgaagagaccaccaaacaggctttgtgtgagcaataaagctgtttatttcacctgggtgcaggcgggctgagtccgaaaagagagtcagcgaagggagataggagtggggccgttttataggagttgggtaggtaaaggaaaaaggggggttgttctctggtgggcaggagtgggggggtcacaaggtgctcagcaggggagcttttgagccaggatgagccaggagaaggaatttcacaagacaatgtcatcagttaaggcaggaacaagccattttcatttcttttgtggtggaatgtcatcagttaaggcaggaaccagctatctggatgtgtatgtgcaagtcacaggggatatgatggcttagcttaggctcagaggcctgacaccacccaaagtgttttatgcagtgaataaaatcaaaataatgcatcttaataaattccagctgttaaaagaacaaacttagcaatatataacagtttgctacgcaggatttttgactattcactttgggagttattttttaaaatccacttttttttactgagtcttactacatatcaggcactggacttggccatctaggtaactaagaaaaagttggttaagataggaaagacccataaatcaatcctttgattaccaaatgcaatttttaactttcaaacatccccaagatcaagaaaccctaactaaaaatacatacccttctaagtgttatttgattttattagtagcaagggtgtttggtaaggtcgtgaacctctatttttgatccattattccaattaaaagcatgcgtcaaaagctaatttgttatttttctaatgtgtttaagatttggcattcagtttttacacatgtggttcagtgatttatcatgaaccctaaactgcacactgctcaaaaacagcaacacagatgtgcgttacatgaaataatggtttttgatacatatcttcaaattcaattcagtttagggtccagtgaagaaaaagatatccagttatcgggtggtaaagagcagaggaggtaaactagttaagattattaatatgcagtgaagtgttattgtctatcttatcctttgagtaacaagatgctaacacgctttcaagaaaaaactgcttaaaactatgctaaaggcccatgcattgacatcatccattcaacaccgttactttgttacataaaacggttttcttaaggtgtaacatattaggcaataatttggaaattagccaagcactaagcaattataatagcaggtaatacaccatcaatttttgaaacacatttggccacatttcacaatccatctgcagtatggattctatagactctcactcagtttaaaatttgtttctggacctgaatgacaggagaatggctttatgaaattttctcataagacatttaagtagtcttaggttcacaacccttttgttgtaaatgatttaatctgacatgccatataactacaatacaaataattatgttcaattcttaaatgaaaactaaatgccaataaatggtaacagatttgacatggaatgttctaagatcttcctctacataatctgccatggcagattatgaatttcagagcttgaaaacttcagattaagaaccacaagaaaatttactcttgatggcatacaagatcttcctaaaaattaacctaagacctagaagtctcagtattattagaacataaagaaacgcaacaaatctgtatattttattcacatatatttttgtttttagtgtgctcacagaaaattagaacaccttaagtaggagtttaatagcaatttttgtaagcaaagttacattccatctctaagtcaaattggtcgacgcttctccagcatttacaaaacatgatagacaagatgctacacaaaaccattgcatctgaagattttttttttcctttattctcaaagatgactggaaaagaaagcattatctgctgtaatcaaaaacataccacagtataaacagtaaccattccgcttatcacagcttggttgagtttaaaatttgtgtttaaaaggtccaagatgactgcagttttacaaaaatgggcagggtggaaagtcgcaaacttcatgtgcttctggatatcaagatttgtttttatacaatagtcacagttaaaaacaccctgctggtaatacataattacactttattaaggtcataaaccagcaataaacaatacagcctatataacttgtagttctacttaatcactgactggtacacctaacatgagataagtgaaaagttcctatggtttaaatgaactcctaagactatgatcatttttttttttttaaatatgggtattggtgttttttcttttttcctctttccttcttagtcaagacttgtagtgttgtaaacctgcctcacaaaatacatggtaataacttttcttaaaaaaaaagacagcctttacaccatttctagtggcacattattttggcaatgttatgtaccacttccatttccccattgtgacccctatcacttcatttgatatccctttttgacccacccatctctttcatatatgggcatatccatagattgacaaaggaagtttacatttttggataaagatggagagtatgcaaaaacattaatactgatgcaaaaaaataaaaaaatagaaacaaggcagaggaagaaggtgtttaagctctcctcgacctgttggaatggtggttaacagaatgatttgagatgggatctgtggggaggggagaaaaaaaacaaaattttgtgcttaaaaaaagtaaaagattgatgtcaaatatttgtactaagattgcgggtggcaagagttagcatcctgcagttagaagcaaaattagagatttggactggtcaaggacagcattgatatgtgtggggtatgtaaatcacccaagctctgcaaaagtactgagaataacttgtattttccagactgaaaacctaccatgatggggagggattgaagtgggccctggaacaactccggaatacattacaagcttaaggggagagcaaggaatttagaccatagagctcatcattcatcattttattccacataaaatgggtgtttcagcatgtccaaaagcatagataaggaaattgagcttcccaagaagttaagccagttgtttgcagttagagaaagcatgtttttatgaagctgtcctacccaggagcggggaacaggtccctgggctctatgaccatggaaatctctagatgagtaaaagaaagcttggcaaaaattgggcaggatcctcaaacaaagattgagaaaggcttttctcatctgtgaatcagagttctggactttcctgaggatgagaacagctgcatggctgaaatgcagcagcccagagcaaagagggtgctccctggggggtcacagctggtgaagactgaaaatccagatcctaaaattcaaccagacctatcataccagcaggccaccacgaaatgactgcaggtttcactggagagacgaggtacttggcctgcgaattgctttctatgtcctagacaagtaattgcgagtaagccttgagatagcaatttgatagtctttgatagcaatatgacattgctacatccaagtgtgggagtcagtacacttatattgcgcatatcttggacattttaggtttcattttcatttctttttaccgtcaaactgggggaaagattggcccttcatcccagattgtatttatgctcatttttgttttcacccctgcccatgcccacccaaccacactcctgtccatcctctccctcgctactcatatacccctgggaaaagctcactgcatttagatcccaggttcttctcccccaaggcacatcgcttaacattaatgctgggtgctcacttgatggcaataacatttcttttgaaattttcaagaatatgactcttcaagaagcaacaactagaaataattaaaagttcacatgactgtcagagaaaatatagcagaggcagtagcagtcctcgctgagaaacccagggagcaactggttgggctgagaaggttcgtgaggaatctttcatggagaaaattattttgccaacagttccttgattattatttaatcatacagttggctctcttgtgttcctttaagatctgtgagataggtacaaacaagattttatattcaatagcttatacctgtaagcagtacaggcttttaaaagattggacttttaaggcaaaggtaattggtgtgaagtattagccacttaatggaaaatgataaaatggtacatgtttcaatcagaattatgagctgtgctcgacgtggctgtttgtagctgaagttcactgatttctgtacaatgatgaatttctttgtggcagctaaactgctcagcctagagttacacaatcttcaacgatgacgtttccaccctttgcttgggtcattgaatgtctcaggaagaggcatgaagaagaatgaggagctcgacccacctggagatgggtagacatgtttgctgagctatcagtgaattgacgcatccaaggatgcttttctccctacaggaataatctcccgtcatgtctcaaacttctctccatctcactagtgaggatgaatgctgtcttcctctagggtagtggaggacaatcaggtcactgccagaagacagcttttcacactctcgctttcctcgagagaatgttaaactaattggagtgaggcatgaaaggatgaaatttggccaaattggcaggtgtgaacgtcctttcttcacaccaagtagagtcaactggggaaaatgatggtgctgtcctgatgtgagactgtttctcatagcacggtgctggccactgcatgacactctctaccagcagagaagtggagtgctactgtgaaaagaactgacggatatgatttggttctgggaagtgagttttgtaacaccatgctggaaactaactcattagctgtgatcttgcaaaaattctggcattctgagataaagcaatttgatcaccagtatgtcatataaagaggttttggagtagctttaaaagacacagtagatcaatatgaaaatgaaatgtatccatctaataagaatattcctcttggaggagccagtaaaagtgtgtgttcttgtgcctgcctttgtgtgtgcagacacgtgtgcatatgtgtgtatgtgcagcatacatgtgtgtggtataaagaaagaaaaaaatcttgttgcgtaggaagagttgtgtagagcctactaaaaattatatagccaaggcatgtctcttaattttggaactactaggtgttaaaaagcaaaggaaatgaacatcagagcaagtgaaatatgagagccagaaaatatcaatgtgagttttgatatcaatagaccaatgaattgccaatgatgcagaagagctttatgagccttggcaggcaattaggtaagagtagtttcttctggagtggcaatttgaagtggttattaactatatactgaaatttgacgggctaaagaacccagttaaaaagaaaaccatccatatcgaattgttccctctactttgtttaaaaaacaaaaaacttcatgatgagctgaagtaagagatttttataccaaacaaagatgactaaactgaaagtatgaaaccttctatttttagtgaatcctgacattctctactgctagcattcccagcttccagataatatgttctccagttggctggttattgtgctgtaaatcacatttcactatatcagcaaacgatggcatgaacttgaagagcaaaacaaaatcagcttggaaaaactgacataaaacctctaaagtctaaaggtagtcccttcccttagaaaatgactggattgattacaattgcattgtattatcaaatatgtggttttattttaattttgtttactttttatttgtttactttttgagagataggatctcactatgttgcccaggttggtctcaaactcctggcctcaagtgattcacctgcccttatctcccaaagtgctgaggttacaggtgtgagccatggcactatttttaaagattaaaatatatttaaacaattaaattccaagtgaagaaaaacatagataaagtggaaggtgattaaaaaagcaagtgtttgctgcactctgtttgctgttcttttctctgttagttgctgaatcacacttatgataaattacatttacaattcatttgaaaataaagctaaatatcaagttttgggatattagaaagtagaggctacagagaagtattcttatctaaatcaataggaaaagtagaatttttcccattgctatgtgataacatagcttatcactagccaatttctcactatctgcataagattttgccaatggacagaaatctgcttccttactttctgtgtcaatcaaaaatagtatcctgagatattattttgtgtttcacagactagaaatttttagcaacctgaggacatgtgacttgaaaacatgagcagtgccaagaattatattctcttccagttttcatagctaaagggagttagagttgaacaattcccagaacagcacagaaagctagaaaatattaaatttacaggctaaggctttgccattgaaagctgactatggagatttttagggtaggcaggaagaacaacacaatctagaagtttgggatcttgctatatttccccttcactaagacttttctaagtaaatagttaattaatatcccaggatctcaatttccatatctgtaaagtgaaagatttgaatggataaactataaggtctctttcaaataaaaaattttatccttgtatggcactctccataattacacacatgtataatctaaccctatggaactacacattaatttcccaagtgtgatatttatgatctcttctgatggttgcatgccatttgttaacgtgactttgacctttcctggtctgtgtggcagctgagctactactgctatatcctgaaccagggctttggctaagcagggatgtccaagtgcattccttatgacccagagaggctcataattccatacaggaacattcatgggaccttgaagaatttatgtttgtgttggtaaatttctcttcatggcctccttgagagcaatgaaagaagtgtattttctgacagctccaacttcttactgcctgtgtttgctcagcattatttcagtcataggtgtccggaaccccagaaagtgcaaagacatcctcacagctccatgaatatatgaccaatactcttcagaggggactgaagatggattagcactttgtaggtagaggttcaaatcccaattgcaacagcaggctgtgtaaccttgggaaatttgacctctctcctttgtaagtgggcacaatggataacatgagaccatatttgtaaatcacctgatgcggtatggcaggctcaaggagtgttgtctttgcactgcccttccatgctgtgtttatcctgttatgaataaaatgaattcaacctgttagactgtcagcgccttcataactggccttccctttcggcttgaggcatgccatctgccgtattttgcaccaacttcaagaacataatgtacttacaaaatacttgtcagtgtggactctgaatgaatttttatagcattaaaaacaaaaacagacaatcagagcaaggaacaagaacaagccatttacaacagaataaacacaaatggctaatcaatatatgaaaaattggtccaactttatcctcagagatccacaatttaaaaaaataacagcttcgagataatttacataccatatgattcgcctatttaaagtgtatatacttcaatggtttttagtatgttcacagagttgtgcaaccatcatcattaattttaaaacatatttattacccccataaaaactcatactcattagtggtcattccctttttttttttttttttttttgaggcagagtctcgctctgtcgtccaggctggagtggcaccatctacgctcactgcaagctccgcctcccgggttcacgcccttctcctgcctcagcctcccgagtagctgggactacaggcgcccgccaccacgcccggctaattttgtttttttttttatttttagtagagacggggtttcaccgtgttagccaggttggtcttgatctcctgacctcgtgatccacccgccttggcctcccaaagtgctgggattacaggcctgagccaccgcgcccggctgtggtcattccctttttatcccttaatcctttccttccccttaggtaaccactatctactttctgtctatagattttcctgttctggacatttcatgtacacagaatcctacaatatgttgtcttttgtgattagctagttttgcttagcaaattgtttccaaagtttatccatattctagcacattcactttatgcctttttaaaaaatttggaatttgtttttttattttttaaattcatataagatatatctaacataaaatttgctactttaaccactttaaaatatgcagttcagtggcattaattatgctcataatgtcatgcaaccttcgcggctatttccaaaacgttttcatcaccccaaacagaaactacaaccattaagcaataactttccattcctccttcttcccaggggttgataacctctaatgtcctttctctctctatgtatttgcctgtcttagatatttcatataagtggaatcatacaatatttatccttttgtatctgttttatttcacttagcgtaatgttcaagtttcgaccatgttgtagcatgtatcagaacttcatttcttatgaataaatataccatattttgtttattcatctgttgatgaacacttgggttgttcctaccttttggctactgtaaataatgctgcaatgaacatgggagtgcagatataccttcaccatattgatttcaatttcctctggatatatacccagaagtgggattgatggatcatattgtagttctatttttagttttttgaagaaccttcatattattttttatagtggctgtactaatttatattaccaccaacagtgtataagggttcccttcactttgtatccttgccaacactcatctttcatctttttgatagaagccattctaacagatgcaaggtgatatttcattgtgattttaactagcatttccttaatgatcagtgatgcttagcattttttcatgtatctattggtcatttgtatgtcttttttttttttttttagaagtgtctgttcaagtcctttgtccatttttaaatcaggttgttttcctttcattgaggtgtttgagttccctatatattttaggtattaactccttatcagagatatggcttgcaaatattttctcccattctgcaagatctacggcttcaatgcaatcccattaaaattctttcattttctgcagaaatagaaaaaacaatctttaaatttgtatggaaccacagaagactccaaatagccaaagcaatcttgagcaaaaagagcaaagctggaggcatcacacttcctgatttcaaaatattttaaagtgattttaatcaatagatagtactggcataaaaacagacaccagtgaaataggatagaaaacccagaagtaaacccacatactcacaattgattttcaacaacagtgtcaaaacataacattgggaaagggcagtttcttcaataaatattattgggaaaactggttaaccacaggcagaagaatgaaattggatctgtatttcacactgtttacaaaaattgactcagaataattaaagagttaaatataaaatctgtctttttgattaaagccatcctagtgagtgttaagtagtatctcattgtggtctgatttgcatttccctgatggctaatgatgttgaatatcttttcatgtgtttattggccatttgtatattcttaaactgttagtggaagtgcaaattaactttaaaaagccactcactttggaggacagtttggcaatttcattcattttgagccaacaaacccatttgtgggaatttaccttaagaagataattacagaactatgaaatgatgtgtgctcaagttattgcagccttcttttacaataaagaatcggaaacatactctgtagaagttttaaaaaatagtaattttctgatatacacaaaatgatgtactatgcagccattaaaatgatggtatggaaataagtacttcacacgtaaaatacctataatatacaagtcaaggattccttatccaaaatgcatgggatcagaagtgttttggatttggaattttttaagattttggaatatttgcatatacataatgagacttcttagggatggtacccaagttcaagcatgacatttatttatgtatcatatataccttatatccatagcctgaagttaatcttatacaactttttctttcttttttttttttgaaacggagtctcgctctgtcacccaggctggagttcagtgctgcattaagctcactgcaacctccgcttcccaggttcaaaactctcctgcctcagattcctgagtagctgggattacaggtgcacgccaccaggcccagctaatttttgtatttttagtagacatggagtttcaccatgttggccatgctggtcttgaactcctgacctcaagtgatccacccaccttggcctcccaaagtgctgggattacaggcgtgagccatggcgcctggcctatacaatattttaaataactttgtgaatgaaacaaagtttatgcacatttagccatcaaaaagcaaaggtgtcactatctcagccacccacgtggacaacctgtggttgtttggcatcaccatcatgcctgactgaatttatatgccaccaatgaacaattattttcttactcttatttatacatgagtctctaatagtaaagacaatgacataccatcaatacagtgaaaaaatactgtgttcagcatagctaagcagaacagtagcatcaccagaatatctgtatcagctgttaaacaatagcagcaatgaacaacgacaggctttcagtccccacttgtgacctgttacgtcaggtcagatgtggaattgcccgcttgtgacatcatgtagttgctcaaaacgttttgaattttggagcattttggatttcagattttcagtttaaggatgctcagcctgttctgttgaataaatagtgtgtcacagagtagcatgccattttaccttttgtcttttaccactttcgtgaaaacgttcgccttcttctctttgtatttgtgtacataaggagatgtacagcggatgactggtaaaagtgaacagtgtttacctctaggtgctggaatttgggatagcattttgtttttcctttgagattttctctgctgttagaactaaagtaattcagcctatatcaaaacaacaataataaagttactttcaaaggaagaataattttgctctgaactgtgcctaccactatctccccttactattgaggaccacaccattttgaccctgaatttctactttcaaaccacaagagaatcccaataaactatagtaacatggagaactggtgtaagaaaaacacaggagcttgttttcattgaatttccttgcaataattacacgagtttaattaaaacaaataaattagaattgatacactggaatcaatatgcaaaaaacaaaatgtgcttgttttacgggtcctaataggattccaagcaggaaccattttctagcatttatttctagcacatctatctttgaatggaaatttgtgggagatgatgagagaaatctaaacatttcccattttggtgcttatcatcagcccagaaggtttagttcatccagtcttgttcagaattgttcatgctctgtcatgcctgtgctcattgatgtggttggctccgtgtccccacctaaatctcatctccagttgcaattcccatgtgtcaggggatggggcctcgtgggaggtgattgaatcgtgggggtggacttcccccttgctgttcttgtgagagtgcgtgagttctcatgagatctggttgtttgaaagtatgtggcactcctccccttgctctctctctcttgctgtcagaggtgattgaaccagaacaactccattttgagtaggggctgggtaaagtaaggctgagacctactgggctgcattctcagacagctggttaagctttctaagtcacaggatgagatgggcggttggcacaagatacaagtcataaagtccttgctgataaaacagattgcagtaaagaagctggccaaaacccaccataacaaagaaggccacatgagtgacctctggtcattctcactactcattatatgctaattataatgcattagcaagccaagagacgttcccaccagcaccatgagagtttacaaatgccatggcaatgtcaggaagctaccttatatggtctaaaaaggggaggagtactcagttctaggaattgcccatccctttcccagaaaactcatgaataattcaccccttgtttagcatataatcaagaaataatcataaaaatgggcaaccagcagccctggagtaaccattcttttattacttgacattcttagtgaacttgctctcactttactctatggattcaccttgaatattttcttgcccaaatccaagagccctctcttggggtctggatctggacccctttccagtaacactgccaccacatgaagaaggtgcttgcttccccttcgccttccatcatgattttaagtttcctgaggcctcccagtcatgcttcccattaaacctgcagaactatgagtcaaacctcttttcttcataaatttttatagcagtgtgaaaacaaactaatatacccaggctgttccacatctggctaaaaagaccctctgcaccttgaattgctagacaaatcccattgttctaccaagactggctttgattcacatctatgctcccaatactgtgtaaaaactgcctggagatctgtttcttgcttatctatcttcacatctccagagctctgtgcctggaatactgtgagcactgtgcctggaatattggcagcactcaataaatgtttgttgagtaaatgcatgcatgtgtgcatgcaggcagtggtcagattgtaaaaggctttataagccttttacatgctaaaagggaatgctaaagaaagggaaatcaggccaggtgcggtggctcacacctgtaatcccagcactttgggaggccgaggcaggtggatggcctgaggtcaggaattcaagaccagcctggccaacatagtgaaaccccatctctactaaaaatacaaaagattagctgggtgtggtggtaggtacctgtaatcccagctactagggaggctgaggcaggagaatctcttgaaccttgaaggcggaggttgcagtgagccaagatcgtgccattgcactccagcttgggcaacaagagtgaaactccatctcagaaaacaagaagcggaaatcagagtcagtcacaggagtagggtcctatgttgccttagaggtagtgtggctgctttcttgatgtcctctccttactcgtacctgcccagtcttgtagctttcagtatgatccacaaattcaacacacacatacccccaccacgcccaacatacacacatatacatacataaatacacaaacaacagaaaagaaaatgtcaccacatatttcacatgaccttagttctttgtttaaatgaaaaaaaatctcataattttttctcactgaaaaatgaatatatagtcaatgtacactagactatagaaaaaagtacaaagaagaaacatcacttgatatcccattatctacagatgaatggttagagttttgctgtcttttctatataggcatatatatttacatatatatgcatatatttaagtggctgataagacaaaaaataaaacaattaaaggagatgttcttttttcttgggaatatcagttgaacagactgtacattttgtcttttgtaaatttaaggctagctagaaactcttacacttgggaaaaagaagtattcacagatctttgtgtttttgtgtggcttttactccccttttactaatagaattttttttttttaaatcaagagtaaacatgaatgaagggttatagattttggaaagacataacagaaagcagctgcctcatgcaccctctctcttcacttctaatcctgttcaccaaagctaaggacattcaaccatttgcactttttttcatatgtatctccttatttttaaaggacatgcctatattgctattctggatttttcatttttagtagttatctattcttaccatggaagatgaagatttcattctcttacatgccccctccccactcttccaacccatgttccttccttatgctccaaatactgttcatcatcatttttgttcagagtagactgttgaagacattgtttcaataatcttctcattttatttacagttaagctatgtgtcatttaatttttcttgtagaacattttgtttttcctggagtttataattgtgttattttttagtttgtttgtaagtatgtttatttagatactgagaaaaaaatttactcgaattttaccagtgccaatacctggtttagggtagaatatttttgaaaatgacctacaattcctagtaaattgcttgagcaattttctggtagaatttaacaagatgaagagcccactttagaggttggatttatctgcccagctaactgtcgtcagccttatgatgagcttcataaactttagccagactttattatacctagtctaacaaagtcacctagccagctttctttctctttaaatgtctctaccagagaaatcttgactggctttatcagaagcctttgctcttgcagcaagtttgacataaaatattgacactaaccagtaaccaattcgcttggaaagttccttcagctatgttcatcattaattcttccacttagtttccccaagaagtggaaatggcctcccaataccttaaaacacattgggtaatctctacatttcattctttccttgaagacatccttcttggagcatgctattttctggctgcattgtaggttgatgagtctctagacttgctgcacagagatcgtcatggggacttcttttgccatcttcctgggaattccctttcccctctcctagattggatgaagagttggtctcatgggggtctgtgaccgttgcaatcgcacttaccagggctctgcatttggcttagcactctgctgttgccattttgaaattcttaatagctgggcacggtggctcacacctgtaatcccagcactttgggaggccaaggctggcagatcacttgaggccaagagtttgaaaccatcctggccaacatggtgaaaccccatctctactaacaaaacaaaaattagccaggtgtggtggcaacgcacctgtaatcccagctactccagagactgaggcactagaatctcttgaatccaggaggcggaggttgcggtgagctgagatcgtgccactgcactctaggcctgggcgacagagcaagactttgtctcaaaaaaaaaaaaaaaaaaaaagaaattcttaataagttctgaacaaggggccctgtgttttcattttgcactgggtcccgcaaattatatagttgctccttattggactcccaggtttctgtcttttggtttttttttggcaactctctctttttgggggagcacctactctagcagcttcctaagtaatgctgtataagagataagagtttttgaaattttgcatgtctgaaaaaaaatctttatcttaccctcatattcttttttttttttttttttttactttaagttctgggatacatgtgctgaacgtgcaggtttgttacatgggtatacatgtgccacggtggtttgctgcacccatcaactcatcatccaggctttaagccccatatgcattaagtatttgtcctaatgctctccctcccctgtccctaccccctgacaggcccctgtgtgtgatgttcccctccctgtgcccatgtgttctcattgttcaactcccacctatgagtgagaacatgtagtgtttggctttctgttcctgtgttagtttgctgaggatgatatcttacccttatgttctaataatagtatggttcagtatagaattcccaggtggaaattattttccttgagggtttgtttttgtttttgtttttttttgagacaaagtctcatactgttgcccaggctggagtgcagtggagtgatctcggctcactgcaacctccgcatcccaggtttccttgagggtttgaaggcattgcttcattgtcttctgatgtccagtgcttctgttaagaaaacagatgccctttgattcccgacctgtggatacgatctgtattttctctcagttgcagctttgccatctactttctggcaatcaagcttgattgctgttgtcttgtctcatctccttgtttttgcaggtgattatttaaaagtcaccattttagcagtattttgagagagagcagatgtaaacacacattttcaatccgagccacttttaaatgtctgtgttgcttataaagtcagctctttctcttcgtatgtagaatcaggtggtaatggtggggataatttgcataagaagccttagtgccttctggaagacacgaatctttcttttcaaaatttggtggcacatgcttgtaatcccagctacttgggaggctgaggcaggagcattgcttgaacccgggagatggaggttgcagtgagccaagatggtgccgctgcactttaacctgagccacagagcaacactctatctcaaaaaaaaaaaaaagagagaaaattcaatgttaaggaaacctttgctcctgatgagaaagaacacgaaaaactgcagggaaaaattcactattagaaggaagtagactgtattggtaacctagttgtgcctgctggatcaaagtttggctacatgagattgaacaaaagaaccatctccttgttacccaaggagatgtatcatgccaaatctattgtttttgttttgttttcttcaaattattttttccttaataacctggcagtgattcaaaatatgaaaagaagattcagatgtgttctctttaagggggattcgaccatgactgccttacataagcaggatcaaagtccatcatgggactggattccagagaacaatgatggtaagaaggcttcagggctcacagtttgaagagtgttgttacagaaattctctgaggggtagcaggtgcagaagagtcataaaatttaagggaccaaccatggataggctgttgccaggtcatgagcaccttgaagcatctcttgatggccattcattagcctaagtatttgttgtctgggagaactgagcaagatgagctgcacagttcagttgtccatagggtcatgtttcttcagcacagagacctggtctccctgatcattgtgggttatggaaaaacgtgaccacacttaaggcagaagtttcaattccctctgcaatttttcctgcagcactacctgcctaaacacttcacatatatgtcaattcccttccagattctctattgttgaacacgaatgtgtgtggttttaaactattatgaataatgccatcaatatcccaaatcacatatttttgcatattcttcattttttccccatgcacattttacatattgtgttttgccagcatacctccagaaaagttgcttcttcctcagacttagtgtaattttacttaattttttttaaaacacagcaaatataacaaatggaagaaatgacagggtcatttcagcctctttttatttgaatatctgtatttcttaaggttcattttcatctttgatagaattggaatgcatttacaacatgattataatatctgattattaataaatcagaaataaggatgtattttttgttatcactgagatttcaccttcatgtagctctgtacccacttctaagtatattttacaagcatttctctaagaattccaaccatgtgaaagtactctggcaataaaattttaaaagcctctgtttgcactttgtactttttaaaggtaagagaaatttgaggcacaggtgggcagccgagcccttgagagaaagcaacaatagcaccaggtttatcaccgttcaggtaaatgttagaatgtggaatgcttttattatccctgacatagagatccttccagtgtatttagactgaggggtagttttattgtgccaactgtcaaaaggtattgacttcaatgtatgtgggaaaagattggactccagaggcaccgtgattttccttgctctcctggatggtgctgcacagcccacgggggctctggcggctgcatacatgtgcagtaagtgcacctgaaaagaatacatgtgctcaggtgtgtattctgccatccaaatttgctgtacaagctcccttgaagttgactattgatttgctgccaaatgcaagggcaagagacttaatgaacagttggcaacatttatgccaaattatctttaatttttttaagggactatatctttttcaagtagtctggcagtgaacttcagcttcactcattctctcaccctcctcaatatccagttagttatttggcctggcaattcaacttccaaaaatccctctcaattcagtatctcctttccatcctgagctaccgctgctcatgttctagctcatgaatttaatcccaacactaatgaggctccctgcttactggatcttcctttcttaataactcatcactctaaatccattaggtcattgttcttaagaatcttaatggagaaaatattcacaagaggttaacgtaatgcaaaagatggtgaaacgctctggaataaggatggaagcttaatgggaaacaaataccccatcctatttttgcatgtcctctgatctcctgctggggccacccactgccaaaaacaaccaaaagttagagggcaagcaaaagagcatgggtgataccatctatctacaacagttagcttcttagggtacagactaggtggagagataccatggtggggaaaacgacatgtggacgccattcagcacagttactttttctgactctcccaagaagaacgcattttcccctcattgatattccaagagaaatatcattttattggtacctcaactgaggcacctgtgatactatatttgtaaattatttccatgtttagaccttagctccttcagttaagaactatatcttaattatgttcatatctttagcagttagcactatcttgcagacagtggtgcccaatatatgtttgctaaataaaagaacaaatgatggcatagttgtcctggtgtctttaaagaaaataatggctataaagaaatcctttacacctgtaatcccagcactttggcaggccaaggtgggtggatcatgaggtcaagagatgaaggccatcctggccaacatggtgaaaccccatctctactaaaaatacaaaaattagccaggcgtggtggcgggtgcctgtagtcccagctactcaggaggctgaggcaggagaattgcttgaacccgggaggtggaggaggcagtgagctgagatcacgccagtgcattccagcctggggacagagcgagactctgtctcaaaaaaaaaaaaaaaaaaaaaatcaggttagctggagtcagggattaggtaatacggaatgcagaaatagtgttttcttacttagatcatgagcataaaagcactttgtgagatataatgctattcaaatattactagcatcatttccattattctggattgaacataagaaggaacaaaagagaaacaacaaatagcagtcaatagggagaatgttaaatcctttggtaatacctattacatggagaaagttaaaacagacaaacaaaggtccttattcagctaggaatggtggccagatcagggtcattgaagtctagtttcttttctaaccctgacttgctttgcagtatttggtaaatcacttaacctttctgcggtacagtttttccaatccgttaagtgtctattatagtactttctccttactctcgtgcaaggatgtttgggtgattcatttgataatcctgtaaagtactttgagtcccatagagaaagccagggacacaagattttaactgggattattagttagaaagtctttttgccttggttgaatctccgtttttcatttgtagctcacctgcttttctgtggctttcccagttccatccttgttcctgtacacaactgtgagggtgtaatgataaccaattatatatcccaaatgatggggctatcattagattaactagttgggtagatgtagaaaaattagaaaagtgagaagattttcagcttgtctgcagatgactaaggaaaacacttagagtgggtgcagtggagaaagattattagccagtgactgaaatcaattaggaacctaaccaaaatgttgttatgttcgttggcacttgaccatgacctttttgccttcctaaggaaaaataataactggctccaggtttaaagaagcttcatagtttacattgcttgatacattaaattttgaatacgttttgatattggtccagttttacaatttccttcgaatgacagaacctttacggaggacaatattagcacctctttatggagcaactgaaaaactgcaataatatctccaccatatacttttggaggattgagaaaatgtgtcatcgcttggaattcctaatcttattttattcattcaggttgaggaataatgtaagatattgctccactgtggctttatgaaattttttacttaaaaaaatccaaagcatgtaagtatttatctcatggcttaaatgttcatcactgtaaggagaagtttaagattggaatgtatctctagccttgctctctctccccctgagatctggctttatactttacagcagtaggtttgcaaatcaaaatgccagcttgacctagctgccagaaagtcctgaatatgaatcccacaacagaatttattaattttcctttacaagttggtaatttcttattttctcttaagtaatgctaatttcgggtacacccttgccatgagggaggttctaggtctccagtgttattgtcatacactggcatgtatactgtcatctctactggtattatataatgttgttgctggtacaggctttccccagaatttatagagatggagacaacacgaactaggcatcatcagtcacagcaactcagtttatagttattgaaggaattgttgaaggaactcctgagtcagtctgtaagtgaaatcacagacatgtaaaataaacacttacattttagattatatgatgatgctaaattttctttaagacattggagaattaatgtgggggcaaagaacagggcatgacaggagaaagggccaactgggtccctctccatttacaatgagtattatctattttatatttaatttttatcttttctatgaggcatagttttattaatttcagttatacaccataggcaaaaaaatgttcccagttagagatcctgccaagcatctctaatcaatgttgaagccctggtggaattaagttggttgctttgctttttaatttttttaaaaaaataaatagggtatatgggcttgttgtaaaataattcaaacagcaaaattgcaaagtagatgtcatctgatgtcatagctgttcttcccctagccatgcagtttcactgcttttgaaactccagcccccttttcctaggctagctctgttgggagcctttcagaaatcttttctctgtatacacacacgcatgtgtatgttatgtacatatgtatcaatcatgtctttatttatatcgctgctttatttcagtcaggctgctataacaaaatgccacagattgtagcttaaacaatagaaatggatttctcacagttctggaggctggggagtccaagatcaaggtgctggcagatttggtgtctgctgagggcctgcttccttcatagatatctgttttcttgctgtgtccacacatggtggcaggaagggcaaaaaggctctctgaggtctattttatcagggtgttaatcccacgtgctttgccctcatcacttaaacacctcccaaagctccacctcttaatatcatgattttgggagttaggtttcaacgtatgaatttgggaggacataaacattcagaccatagcaatcacattatacatattgcatgtcaaaccttatatatataagatatatctttttaatttgacaaaaaaggatcactttccaggtactattctgtaatctaccttttgtgctttattatacatcgtcatcatatttctgcttcagtgtgataaatctattgtatttaccctaatggctacaaagtattgtcctgagagatatcctaatttatttttttaaatgattcccaattgactggccttaagttgcttctattttcatagaagcaataattatcataatgctacaataaacattattgtacatataacatttttgcatttggggagagtatgtatattgcaggagaaattcttagaaatggaatttctgggcatatgaattttcaaaaatattgccaaattaaaaaggactgcatatatttactctcccactagcactgtgggaaagccttttttttttttttttttttttttttttgagacagagtttcactctgtcacccagactggagtgcagtagtgccatgtcggcttactgcaacctccgcctcctaggctcaagcgattcttctgcctcagcctccggagtagctgggattacaggtgcaccactactacccagctaatttttgtatttttagtagagatggggtttcaccatgttggcgaggctggtcttgaactcctgacctcaagtgatccacctgcctcggccttccaaagtgctgggattataggcgtgagccactgcactgtgcccggaaaatcttttttattcatgtctttactaccattggtcagctaagccagaagacagatgacagagggctggtctatttttgaatattgacagagaagaatgagactctgggctgggcgcggtggcccatgcttgtaatcccagcactttgggagcccaaggtgggcagatcacctgaggccaggagttcgagagcagcctggccaacatggtgaaatcccatctctactaaaaatacaaaaattagctgggtgtggtgatgtgcacctgtagtcccagctactcaggaggctgaggcaggaaaatcgcttgaaccctggaggcagaggttgtagtgagctgagatcatgccgctgcactccagcctgggcaacagagtgagactcggtctcaaaaaaaaaaaaaaaaaatgagactgatcaatgttgctttgacttcaatttactactaaaacagctagcaagaaagggaaagggtactcgctagaccagtgggtctcaacacctggagcagcagcagtagcaccacctgaaacttactagaaatgcaagttctcaagtcccatcttaaatctgaatcagaaactctggtggcagggcccaggaatctgggtttaacaagatcttgagctgattttgatggtggcccaagttggagaattactgcagtacagcttgatgaaagtgagaatgcagtttcccagtgctttccttatgcctcttggaggtgaacctggagtcctctgctttaggttgaaggtacccagggctttgtactccctgcatctcaccccactggggtggagcaggggacccactgggattcagtgtattacttactttcatataaggcaactcttgttgtcccatagttataaagctctgtgttctgtttcttattgtattacgtgtacgtggacatgccaaacattaacaaatatttggcttcttgtctatctgaaaaatggcccctcatttctatttaacatgaatttctttaattataagtgaagttgagcatcttcttatttttatgggccactttgcacgttttcctcttatttattactttctatatttgtcatattttctattggttggttgtctttttaaaaaagaattaaattgtaacagctgttttaattctaaggaaattagcctttcatcatttgtgttgcaaattcgtttttacctactttgtcatctatcatttaaatttagttacaatacatttttgcatcacagagagttaagatttttatgtagtcaaattgataagtttttatgtgtctgaattttgaattttatgtatgcttagatagatcttcccaaccctaggataattaaaaaaacatattttttcctaaactttatggctttatttttagcatatacatctttgatgtgaatggaatttattgtgacttaacaactgaagtatacatattaacttccatttccaatggaatatcattgattgagattataattaacttatagctcaataaaaaaagagttttaacccagagttttcctaaccaagaacagagtatacctttacagttacttattttttcatttttttttccttcgggagtgatttaaaggttctttatatagttattacatatgtattttataaacttttggaatgtgatgtttcttattataagtaacctttctactaattatttgcatataataaagctcaattttttttgtgtattgatttcataatcaccttactgaattctcatattatttttattagtatagtttttagaggattcttaggagttttccaaggcgatgtggtttggatctctgtccccacccaaatctcatgtttaattgtaatttccaactgttcattgcttgtaatccccagtgctggaggtgggcctggtgggaggtgatattggatcatgggggctgatttcctccttgatgctgcttgatcatgagtgagtgctcatgagatctggttgtttaaaagtgtataatgcctcccctctctctctcttcctcctgcttcagccgtatgagcataactgcttcagctttgccttttgccatgagtaaaagctctctgaggtctctccagctatgcttcctttaaaacctgcagaactgtaagctaattcaacctcttttcttcataaattacccagtctctggcatttctttatagcaatgggagaagagactaatacacaaggttgtaataattatctatgaataatataaagcagcctgtttttgaaattagacttctgttatggagtgaatattatggtggaatatgacctttctaaaatttttctgttcttaaaaacatcatcttgggctgggtggtggctcatgcctgtaatcccggcactttgggaggcctaggcgggtggatcacaaggtcaagagaccgagaccatcctggctaacacggtgaaaccctgtctctattaaaatacaaaaaaattagctgggcatggtggtgggcacctgtagtcccagctactctggaggctgaggcaggagaacggcgtgaagcttgcagtgagccgagattgcgccactgcaccccagcctgggtgacagagtgagactccgtctcaaaaaaaaaacaaaaccatatcatctttaatgaagtaaatgtcatacaacaaaattgaccaattttacatttgtaattctgttttaatcatgtagtacagctgtataattaccacaatcatcatataaaacatatcaatcctgccagaaaattctctcctactcctttcctgtcaattgcttctccctatctcttgttcctggtaccactaaataacttttggtcattgtagttttaccctatctagaattttatataaatagactcatacggtgtgcagtcttttgtgtctcacttttttcacataatatatcatgatatggctatacaataatttgtttatattcactagttgatgaacatttgggttgtttacaactttttggctattaatgaataaagaggctattcatgtacattcaagtacatgtcttgtctgggtgtgtgttattatttctcttgggtaaatacttaggagtgagcctgctgagttgtatggtaagagtatatttaacttgggccgggtgtggtggctcacgcctgtaattccagcactttgggaggccgaggcgggtggatcacgaggtcaagagatcgataccatcctggccaacatggtaaaaccccatctctactaaaaacacaaaaattagctgggcatggtggcgtgcgcctgtagtcccagctactcaggaggctgaggcaggagaatagcttgaacctgggaggcggaggttgctgtgagctccattgtgccactgcactccagcctggtgacagagcaagactccatctcaaaaaaaaaaaaaaaaaaaagtatatttaacttaataagaaactgacaaacactttgtatgactctaccattttgtattgccatcagcattatatgagtattccagttgcttcacattttcaccagcattttgtattgctatctgctgaatgtgtccccaaaagtcacgtgttggaaactgaatgcccagtgcaatagtattgggaggtatggtctttgagaggtgactgagtcatgaggactcttctttcaagaatggattaggtctcttataaacagggcttacagaagtgggttcattctccttcattcttctaccatgtgaggacacagtgttccttctctctggaggatacaacattcaaggtaccaccttgaaagcaaagaccagactcttactagacaaggaacctgccagcaccttagtcttgaacttcccagttcccagaactgtgagaaaataaatttctgttattcatacatcaccgtttcaggtatttttattatagcaacacaaaaccaagatgggtattgtcttttaaaaaaaattctagtgagtgttttgtagtatctcagtgtgtttttaattttcattaccttaatgaccgatgttgctgagcatctttgcatgtacttacttatcatttatagatattatttgatgaagtgtttgcttgaatttttttgtctaatttttattggtttgtcttactgagttgtaaaaattctttatatattcttgaagcagatcctttatcagctatatgttttgcaaatgttttctcccagtctctgtgacttgcctttttattttttaaatgatactttttgaaaagcaagcttttaaatattttgaaatccagttcgtaaatttgttgcttttatagtttatgctttttaaagaaattgagtgtaacccaaggtaacaaaaatttctcctgtgttttattccagaaattttagttttaacccttacagttaggtctgtgttcctttctgagttaaattttggatatagtgtgaagatgaggattaaagttctctctcttcttttggtatataaatatccaatttcccagcactatttgttgaaaatggtatcctttccagagtgaaatacactggcacctttgttgggaatcaatgagccatataagtgtaggtctatttctagattcactattctgttccattgattcacacgtcaataccagatgtcttgattacttgagcattataataagtctaggtgtaagttttatagtaagcctgagtgtaagacttctgactttatttttctttttcaaaagactttcaactttactttttcttttattttggctatgctagttggttttcatttctatgtaagttttagaattttcttgtaatttctgtggaaaacactgctgggattttggaattctgttgaatctatagatcagtttggggagaattgatattttaataattttgaatcttttgatttatgaccacaatatatattttcattatccagatgtctttaatttctttcagtaatgtttagtaattttctgtctacatgttttacaaatattttgttaaatttattcctctgtttttcatatttttactatatttttatgatatttgtttaaaatttccaactgttcactgcttatatatgaaaatgctactgatatgttgactttgaatcttgtgaccttgcagttagttctagtagatgttttgaagatttcttagaattttctacatagacaataatgtctgtgaataaagatagttttatttatttatttatttatttatttttaaaattttttggaggccttgtggatttgaagagttttttttctttccagtcttatacctttttagtttttttaaaatttttcctgccttatattgtattgataagaacgttcatacaatgttgaataggagtgatgagagagaccatccttgccttgttcctgaccttagagtaaaagcattcagtgttttgcccttaagcaggatactgtttttagttttctcatacttttttttttgaaatggagtctcgctctgtcacccaggctggagtgtagtggcatgatctccactcactgcaacatctgcctccccagttcaagcgattcccctgcctcagcctcccgagtagctgggaccacaggcgcccgccactatgccaggctaatttttgtattttttattagagacggggttttgccgtcttggccaggctggtctcgaacacctgaccttgtgatctgcccatctcggcctcccaaagtgctgggattacaggcatgagccactgcacccggcccctatagatgccttttattggattgaagagcttttattttattcctagtttgctgcaaatttttttttttattattacaaatgggtgttgaattttgtgaaaacttttttctgcatccattgagatgatcatatggtaagttccattttagacaattgatatgatgactcattgtttttctaaggttaaactaacttcacattactaggataaaccacactggattatgatgtattattcttttaatatatttcaactgactgaagtattgttaacatttttatatctatgtttataagggatattagtctttagttttctttcttataatttcattacctttggataagttaaaaacatttcagtcgtattttagtttttccactcattacatttaagactttaaataaacatacactttaaactctatttctatatatatcaactttaaataatatattctggagttttaattttaggtaggatggagtaagcacactcctccatctctgagtgcacactcctccatctcttagtacacactgaatacagctaactcattaaatatagctttaaaacctgggtataatgcgtataacagtgatataaggacactggaaagtaaacagtagcaagaagattgggaagaagaccagaatttaaagttttatgaaatgccagttagtttatctttttttttttttttgtaccactatcccttggcatggattcaaggtagtctgaaactcaaaacctgtacatagacatggcatggataaggaacaaattacagacagagctccagaagaggccctatagttttgacttaagcagtatgaagcagggctgggggtgggaggcatcacttaatctccagagacagtgagggcaatccatcatttttattttctttttctctatgtttccttgtaccatagtccccaggcaatgctgtggcaatgacagcagtggcctactggacctgcaaggggctaaaagtctgagctgggggggtcccttcctcttcatttggagaagactgatctcaacagagtgatatgaacactcattgattttttttccctctttttatcctcccaccaagtggcctcatatgtaggacaattgttggaagagcatggtagagcaggataattgaagccccagctctttgtccagaggactgaaagggtagccccaggaaactgaagagtatcagcaagatgtggtgagaaaggacctcagggaaatgactccctgaaagtagcttatgaactctcaggcttgctccttagatacccacttacagatctgattctaaacaacatatcaacgactttgaggtctgagctaaggaatagatcatcacttaatttccatattggccaccgggtgacataaacaggagacagatcagaatagcactacaaatgctttgagggaagaaaacaaacccaaaccgatattgaaactacaacccaggaaaagtcagttggaatttgtggcctgaatctaactgggtcagctgctgaaacaaaacaaaaatatcagcattctccatgggatttaaataagacccagagtcttatattattcaaatgtctgtgatatgatctaaagtaacttggcatcttaagaataagaagaatctcaactcttatgggaaaagatagtcaacagaagccaacgcggagatgacacacaggttaaaattttctgacaaggtctttaaaagaagaaagggtgaatacatttgaaatgagttgaatgaaagataattttagcaaataaatagaagacttaaagaacatccaaatagaaattttaaactgaaaaacataacaatcaaaataaaaacctctccagatggtttcaatagcagaatggagatggcagtggaaagggtgaattctaagaaaaatagaaattatacaactgagagaaaaaagatgaaaaagaaaacaaacagagacttagggatctatggaactctaccacaatgtctaatacttctgtcatcagagtcacagagggaggagaaatattgttgtatagaaaaaatatttgaagaaaaatgtttataagtcctcaaattgggcagaatttctatgtagctcctatagattcatggaacgcagggaaacccagacaagataatcctaaagaaacatgtttaggcatatcaaaagcaaactgttaaaaattaaagacaaagaaaaaaaagcttgcaggcagctagagaagcacaactcattacttataactgaactatgattctaatgactacacatctctcatagaaaccatgactgtcagaagaaagtgaagcaatatttttaatgtgctgagagaaaaaagtgtcaacctagaactctatatacactgaaaatatccttcagaaatgaaggtaaaatagagaccacagatgaaaaaaaactagaaaataattcattgccagtagacctgctctgaaagaattgctaaagtaggtttttcagacagaagaaaaaatgataccagaaggaaacttggaacattaggaataaataatatcttttaactctgatatgaatggttaggaaattggcacatacatcctcctttctgatatctttttttttttctgccagtgtccattttttcttagctatactcttatttatacatttcaatgtctataaatttgcacaattgtcaagccttacttctatgttttaatcaattcagtgcaaacaatacttttatgccatgaattcttcctttctcaagttcttttgatgacagcacttgtttggtgagaatttgttatcaagaggttttatatcccttaagaaggtctgtctataatcttttgactcacaattttggatactaaatgttggtatgaagaaatctgaggtcactctgattttcctcccatgcaaatgaattgctttttctgagtgaatgctcattcagcttttatttttattcttaaaggtaaacagcatcaccagaatatatcaagttgattactggaatgaattactttttcctggaacatgatgaatccttttcatcctcagacccagatgttcctttatttcagaaacattttcttctatttaatttttaaatattattttctgattgatttgcttgactcccagggttagtcaagtttatgccaactttatttggtctctcttacatatctatcttttaaattacttttgcttctttgttttttgcatttaagttttcagattttttttttcttcttttctgagacggagtctcgctctgtcgctcaggctggagtgcagtggcgcgatctcagctcactgcaagctccgcctcccgggttcacgccattctcctgcctcagcctcccgagcagctgggactacaggcgcccgccaccacgcctggctaattttgtttttgtattgttagtagagacggggtttcaccgtgttagccaggatggtctggatctcctgacctcatgatctgcccgcctcgacctcccaaagtgctgggattacaggcgtgagccatcgcgcctggcagttttcagatttttatcagcctttcttctatgctcccgattcttttataaattgtattacattgtttttgtgtctctatattgcgtttatgtctatggtatttgtattattaacttttgtttcttttgtgaactctggtagcttggtttcactatctttatttcctctttaatttcatatcccttctcagaaagtctccttttcagatcgtttttttccctctttagtttcttgagcgtgtagactattatttgtttactttttttttcatttcctgtggtaattcttctgatacatattctttttaagtgtttttcttctatatttataacaattgtacaggtggtaaattatacatgccatagtactatagccaggtctgctccttggaaagtctttatgtaatatggaaagaaaatctggaggtgggagaattagaaatctgacatcagtagcaggaagattggatctagatgatggggagacacagggtggttacttcattgtgtaaggcagagattggggctgggatgtgacactctgagttggtaggaaaaagagcctgagtgtaaagagaagaacaaggctgatctgagtagcaagaccctctaccctaccttactggaataagctcatccatgcacagaaagctgtaggaaactgtgcacactgctatcaagtatagttttgaatggccaaattatttatttgatgttagttaagcaaacagtttttaccaccgtgaaaactttttctgcctctatcatttctgctggtctccatatagtcccattaaaaaaaaaatcaagcaataaaaaatatacatactaaaagtgaaagctgatcttaaacttcctcccagtccttcacctccttcctaagaagtaactactatttaacaattagctgtgctgtgtctacatcttgaccttttcctgcgtatgcttatacataagaattttctgtctttactaatatatcttttcaatctttctatgccagtaaatatttttctactacaaaaatcatttgtatagtattatatactattattgtatactatatattgtactatatattgtatactatatattgtgtagtattatatacctattatttatttaactatctgctgttcttggtcacacatttaccctaaaatgcagcagtgaacagtcctctatgtggatattatgagagtttctgtagcatataatcctagaagtggattttgtgggtataagaatatggacagataaaattttgataagtactgagaaataatacttcaaaaagcctgttccaatttactgtctcattaatgagtctattttcccacatctttatcaaaagaatattattctgatttttttatttttgcccattagataagttaagaattgtgactcattacttataaaatttgcatactaccaactgcagtggaatttcagcatattttaaaaatactctttgacccatttcttttgtaaatttctgtctatttttagtagcttttttcagttctttttggtttctagaggtcctttatattggttattaattgcttctctgttgaagatgttggaaatattttctcagtctctcatttttgaatttatttataatctttctattattcaaactatttgaacctttatatagccaaatattttaactttatggcttttatatctttgcttataagaatgttctctaaggttaagatgaagtttgcctatatatttttttctgatatgtatgtagttattaatgcttttaatgttttattgagcttagtttttaatctgtctgtaaataattagcctcttattttgacactgcttattgaattgttggttctttttcctctaatttgaaatatcacctgctttatctttccatattgatttatgtatctactctgggaccagtgccacactgttgttggtatttagaatggtcaggcaagttcttcctcattattcctctcttcaaaattgtgctggctatttcgtttcaagccatctgtttagagttttgattggaaatggtatcaaatttatacataaattcgaagagaactgatgaaacgggaaagttcccttattctcctcacagggcgtgtgacaggggcatgactggtttcttcagtgccccactgcccaaagccctagagggaacatgcagacagtcaggtcggggggcgtctagggttgagtgtttacagctctcaaagccccagtgggcatgtgttacagtgcactctttcagttttgccatccacaggtggcttgtattaatcagctcaattacagcctctgccttattgcaaggacagagggctttctgtatcccggggttcttgccctagagtactggaaaaatcggatcacatgtgggcttggaggatgggtgcaaggttttattgagtggaggtagctctcagtgaggtggatggggagggcaaaagggggatggagtgggaaggttgtcttcccctggaattggggtgcccaatggctggacttccctccgactgaatttcccatattgtctgcgtcattctgctgttgatggcctgctggcatctgctggtgtgttcttctgccagtgtgttcctctcaacatccagacacttgtgtgtgcgcccgctagggtctcagagattttatgggcacaggatggaggatgtgatgggccagagtggtcttggaaaatgcaacatttgggtgcagaaacaggagtgcctgtccttacttaggtccctgggcacaggcctgagagtgaagccctcaccagggaccctgcccttctctatccagcatttccctatctccctcctgtatcactgatatcttttactattgagtcttcacatccagaaacataatttggccttctgttaatttagagcttcttttattttcttctgtaaaaatttacagcattctttatattatatgtttcttattgaatttaattatgaacaggttatactttgttattatcatgggatcttttaaatacattctaattggttatgacaggtttaaaaagctactcttaatttttctgtgttgatcttgtatcccaactaaatcctgtgtttgttctaaatgcttactagtagtgcctcttaggtgttctaggtggctactcatagcgtctgataacaataatagtttgtctttttctttcctatatttacaccaatttttttctcctaacatttaaaggttttttttttttttcagtttcctgtaatgattatttattgaatttggaagatctccattgtggtgttaatttcttaaaagcttagtgtttcttgcttgctcttatttgttgctgaggacttagattaaacagtttattgcttttgaagtatattttgtcagtccagttgagggactgagtctcagtccagatgagggactgccagtttgtctagcagttgatacaaactaattacctctggtaactttgcaggagctgaaaacagaagtgtgactagtaaggtgtgaaggtggcttgatttctagatatgaggctcttggtgcttgttggctgacagacactctccctttctttagttcagcagccactctggtagtcttaaacgtcagagtttttaagaggggtattcatagcccaaatctagggataaatgtaggagatggaggaaaggggagttgccgttttattggtgccactgtttagttaaaatacctaaaacattttctcattcccctttttcctgcctccactgcctttggatgtagatttattctggagttctgttgggaaaacacactattttggaatgttttacttgtctactgagagggttcttcggctattttggactatgttgtcaatctatttgctattgctgtgtcacttctagaaactcctcattgtcctggactactggcaaagcttgttttcaatgctgttatgaatttgctaatttatttcctttgtatctattgtatttatgcacagactttatgttagatccttttggttgattgttatccttaattagggataatgccatctggacctgttaatttgctcaagaactgagtggagaggggtggatggaggatgacacattactcactatttaacaaaataaaggtttttttccataataaagcttgttatataacaggtaaaaaatacagaaaaacaagaggaagaaaatgatcattcataattcagtcatgacaatcactgctaatatttagatatgttagcagtgatatcatattatatatatatattagatatattaaaggactatcagtcctctcctgatgcatatttaacattcttgtgattatattctgtgcagcattttgtatttattttttccagttaacattttaacacatttcctgtatcattaggaacactcatgattaaatccttactttaataatatcataagatagagtaaaatggatcctccaagggtgatacttacttgtctttggccatttgggttaatttggtatttagttcttttaagaaggaaattcgatttttatacatttattattaaattttttgaaataaaatctacagtgaaatgtatagagcctaagtgtctaatttgatgttttgataatgcttacatttaagtaatcatgaccccaatcggatacagcatatttacctgactcactttttaatttaatttaatttaatttttgagacagggcctcactctgtcgcccaggctgaagtgtactggcacaatcatagctcactgcagttttaacctcctgggcttgagggatcctcctgcttcagcctcctgagtagctgggactacaggggtacaccatgtctggctaatttttttttcattttttgtggagacagggtctcactatattgcccaggctggcctcaagtgatcctcctgcctcagcctcccaaagccctgggattacagtcatgagccaccatacctggccaactcattttaataatgtctaatgatgaacacctataagaaggtttttcatatttatgtacttggactgtgattctaaaagtgaaataacttggctttattttacaaaccttttagtggactttactaaaatcgcttccagaagtttgtatcaatttacattcccaccagtaagtggagagtgtcaatctttttttctgtgatccccctaacattttttgactatcccccagcagataagctgcacagtttcttgttgaaagcaagttatgactctttctgttaatatctacttccactcaatcatggttgtgtgtgtgtgtgtgtgtgtacgtgtaaaccatcactgttcatgcattcagtggtgttgtaacatttctcccacaagcaaccttcattggcattatttatttatgacagtgtcttcctcatgaaatcatgtctcagtagctcttctctgtcttctttcaaagactgtggtatttctagtcacacaggctctaaaattcatgagtcccaattaatgtctcttttgctccaatttattccaactcttgttcattctgttttcctggctcacagctcttcctactctgtctttccattttcattctcattgccttattttagccctttatgacctcttacttaaaaaatttctatagcttatacctacactttctccctacgcaaatctgtctgacccatgattgctagattaatcactccagagaatttgtgcttaaatattgttactcaaaatactttagtctccactcaaaatccttctcctggggatgtcagcaacatggcagaacaggagactcctgactattccatctctcacagacatacaagtaaacacctacacatgaattagttctctccaagaggaagctagaatccagttgaaagtctcccacacactggaagactgagaaaatacccacatccaaacaggtaggaaaagcagagacacacttgcactaatcctaccatgagcacaacgccttataattaggaaggaaactccaactcccagcttcttccagaaggttgggagtcttgtaccacatgtatagtgcccaacttttacagttcctgtgggagggctttgatcttaagttaccatgcttgaagaacagtagggacagtgcattggaggatttctctcaagcacaatggacaaaggggcttttgaaccatgtgaggactcccagctactctagcccccagggatcagcccaacttctaacttccccctaaagagggttcagcctaagacttttcaaggaactccctgtggctctggcttctaacaagctggtatctgggagtctaataaggagcctataaggattaaacttctttgagtctaaatcagaaagaaggcactccctgtgccttctccccttgctgtctcctgatataaattcctgcaatctctcattagaaagagaagggtgtacctctccatgtctgaaaggaaaagggggcactctctattcctctaccctggcttgctttcacgataagatcacacaaggctccccctacaaggagggtgtgaaacttctgcttgcttgaataggagagtgggcatcacttgcactttcttccttggcttgttccagtgacgatttcagccctacaatatctccatggaaagaagtttgatgcctccaccagcaagaatgaaagggatggcactcctcatgctctttttctcagtttgctcaggagataaactcctgaaatatctcattggaaggagatagagggacctctccatgactgaaaaggaaagtgagaagtccctgacccttctgctctggcttgtttcagcaataactccagaccagaagcctgtccctactagaagagtgagagacttttgcttgcatgaacaggaaagtgggcgttctctgaaatatcttctctggcttgctccatcagtaaatacagatctgcaggtcctggaagtagtttctgcaagcaccaaggactccatcttttacagtttccaacaaggtactggcttctaaattacctagatcttggagttaatggagctctacattcctgagtttcctaagttacagagaacataaagatgacttttaaacatgcaaattttcagcaaatatttccacaggtccaaagtgagaagtctgatcaagaatacaagtatctctctcagtcactcaccttgtgtacagcagaacaagtgtgagataaactctggctgtcaacttctctgcaaagaaagaaggaactggaacatatcttacacctcaacctcttcagctgcattctaaggaactgacttctatcccacttctctcaaggcaatagcatgacttgacactctctaatttctttggggacactaagaacaaagacatcaggttagatgagtacaaggagtttggaagcaccaggaatctctggctgggctgatgggggagaaacatcttttacatgggaccagtctaacaaaattgagagagatggttcttttatctaatgcatggaaacaaacatgagagccaaggaaaaatgaagaaacgtggaaatgtgttctaaatataagatacatctctggaagccaaccccaatgaagtggagatatgtgatttacatgacagggaattcaaaaggacagtcataaagatacttactgagacaaggagagcaatgcaagaacaaactgagaactttaaaaaaagatagaaaatataaaaatagcagcaaacaaaaataattgagctgaagaatacaataatggggctcaaaaatttaatagagggtttcaataccaatctatataaagcagaagaaagaattagcaaacttgatgacaagtcattagaagtcatccaatctaagaagtcaaaagaaaaaagaatgaaaaagggtgaagacagtgtaggggatttgtgggacaccattaagtggaataatatatacattatcagtgtaccagaaggagaaaagaaacagaaagggacagaaaacattcaaggaaataatggcagaaaatttcctaagtctggaaaagaaaatagaaatccatatccatgaagctcaatggtctgttataggataaattcaaagggacacacaccaagacacattacaatcaaattgtcaaaagttaaagacaaagagaatattgaaagcagtaagggaggagtgacttgttacatacatgggacctctagaagactgtcaatggattttccacagaaatcctgaagggtagaagggaaagggatgatatattcaaaactgaaataaaaaaaagaaccctgccaaccaagaatactatacccagcaatcctgtcccttaaaggtgaagaagagataaaaactttctgagacaaacaaaaggtgagggaatttatcaccattagacctaccttacaagaatgctaacaatagtccctcaagcttaaggaaaaattgttaagtagcaacatcaaagtatattaaaacataaaacttactggtaaaagtaagtatgtagttaaactcagaacactcttagattggaacagtggtgtgaaaataaattttgtttctagcatgaaaattaaaagacaaaactataaaaacaactgtagttacactaacttgttaagggacacaaactaaaaattacaaaacatgtcaaaaaaacaaatggagaggaataaaagtatagagtttgtgcaagtgatcaaagttaaatcattatcagcttaacaagggatgttcttagcatatgatgttttatataatcctcatagtggccaaaaaaaaaaaaaaaacaactccttagtggatacaccaaagataaaaagaaaggattcaaagcatactgtgataggaaatcatcaagccacaaaagacaaccataagagaggaagagaggaacaagtaatctacaaattaaccagaaaacaattaacaaaatggcaatagtaagtctttatctatcaataattactttaaatgtaaatgaactaagttattcaatcaaaatacatcaagtggctaaatggattaaccaaaaaaaagactcagtgatatgctgccaacaagagactcatttcatctctaagaacatacatagaccaaaaatgaagggatggaaaaagttattccatggaaatagaaatcaaaatagagcagggatagctatacttatatcacacaaaatagaccttaagtcaaaaactataaaaagaggtgaagaaggtcattatatgacgataaagtggtcaattcatcaagaagatatgacagttgtagatatgcatccatccaaagttggaacacctaaattggtaaagcagatattaatagatccaaggaatgagatagactgtaatataataatagtaggataactaaatactacacttttaacattggacagatcatctagacagaaaatattggacttgaagtatgctttatttatttatttattttgagacagggtctcactcttttgcccaagctggaatgtagtggcaagaccatggcttactgcaacctctacctcccctggctcaagtgatacccccacctcagcttcttgagtggctggaactacaggcatgcaccaccattcccagctaatttttgtatttttttgtggagacagggttttgccatgttttccagtctggcctcaaactcttgggcttcagcaattcacctggcttggccttccaaagtgctgggattacaaatgtgaggcactgcacctgccctgaactacgcttcagatcaaataaacctaacagacatttatagaacattccattcaacagcaagagaatataaattcttctcaagtgcatctggaacattctccaggatatatcatatgataggctgaaaacaagtcttaacacatttaaaatgattgaaataatattgagtattttttctgaccacaatggcataaaactagaaatccataacaagaggaaccttgaaaaattcccaaatatatgagaattaaacagcctgtttctgaataactgatgggtcaaaggggaaattaaaagagaaattaaaaaatatcttaagacaaatgaaaatggtaacacaacatatcaaaatttatggaatgcagcaaaagcagtcctgtgagggaattttatgacaatacatgcctacatcaaaaaaggaaaaagatttcaaataaacattggtagaaacgggatatccacatgcagaagaaggaaattggatcattttcttacaccatatacaaaataaactcaaaatgagtaaaagatttaaatgttaaggcctgaaactgtgaagttgcttggagaaaatgggaaaagctccatgttgttgatctgggcaatgatttcttggacagaactccaaaaaccacaggcaacaaaagcaaaaatagacaattgggattgcattaaattaaaaagcacagcaaaggaaacaattaacagagtaaagacacacccatgaattggcagaaaatatttgcaaaaacttagacatctgatgagggcctgatatccaaaatatatgaggaactcaaaccactcaatagtaaaaaatcaaactgattaaaaactgagcaaaagatctgaatagacattcctcaaaagagatataaatggccaacagatatatgaaaaaaagttcataatatctaattatcagggaaatgcaaattaaaaccacaatgagatatgacctcacagctgttagaatggctattattaaaaaataggaatgataaagttttgatgaggaggtggagaaaagggaactgtttattggtatgtaaattagtatagctattttggaaaagagtatgggagttcctcaaaaaacgaaaaataggattgccatatgatccagcaatctcacttctaagtatacatccccagaactgaaactgatatgtcaaagaaatatttgcactcccctgttcattgcagcataattcactatagtcaaggcatgcaaaactcacaaaagccaaggtatagaacaaatgaatggtttaaaaatgtggtaaatatacacaatagaatactatttagccttaaataagaaggaaattttgccatttgcagcaacatggatacagccagaggacagtgaatgaaattatccaggcacagaaagacaaatgctgcctgatttctttcatatgtggaagctaaaaaagtcgaccttacagaactagagagtagaaaggtggttaccagaacctggagggatggggaaaggaaagatgtcgatcaaagtgtccacggtttcagttagactggagaaataaattttagtgttctattgcactttatggtgaccacactaaaaaaaaatgtactgtatatttcaagtttgttaaaataatagatctttaacattctcaccacaaaaaattagtgagttgatgaatatgttacttagcttggttgaaacttgaatgtatacatcaaaacaaaagagcatattctataaatatagatgatgattatttgtcagtttttaaaaattgaatcttggcatttagggccctccatagtcttccatttttattcctctttatctctttgatcatatctatattctagccagagagaacacttgttttaatcatatttgacacaattctctattgttctctgctttagtcaagtttttgccttttctggagtactttttgctcctccatgatttaatttttcaaattttaccttttctcaaaattcagtatagatgtcatttctttcacaaaattttccctgttaagcccagaaaaataatctcttttccctctgaatcattagggtactttattcatttttgttttgagtgttattttcttaccaagaaaatattatttctttcagtattatgttgaattatgattcattcactgtctaaacctccttattgagtggaaatttctatgagggcaagttacaggtttaaaattatttatttatttttttcaatatcttgcacacagcagaaaattggcaaataaatgtttattgtctgagtcgtactggggagaggaatggaatttggagcaaaggacataacttatttgaatatattggaaaacataccaatctagcatttgttctttaaaaaaatgagttcacaagtgagatatggagcaagatttttagaggttcaaggactgacacatttctgtgggatattctggtttgacttccaaatcacctctgggtcaagacactggaggtgttttagagcttaaaatagaaactcggagctcagtgaaaaaatatatgatcgattattgctgcaaatgtatagaaaatggaattagcacatgcccgtagtatttcaaccatgcttaaagacagtctttctgttgccttaaccccttttgaccacagatggccgtattaagaaaatatttattaaaaatcacagaggtctattcttcatctgctaaactggtagattttaaggatatggtcccttctccatggtgctttaatatttgctaaatgtgtatgtgcacacatgtgtgtgtgcacttcacatcttatccgggcatattggaaaccttgtaatatagtttttgtttatttttaaccttcctctctactgccttccactaccaccatttaaatacacaaaactgtcactgtgtgagatatggccattatgttgctagctcttctgtgatgtttataaaatatgtcaactccctatagtgaattggcattgttttgctctcccacttcctatcaacgaaaaaaagcaaatgcccccaagtaaataatctaactcattaaccctcactgcattacagagatggaaaaatttatcaataataagagctgagcatcaggggaagatgctttatcttaccccaaacctggagactcatcccggggggcaccaggtctctgcagtagctcccatctccttgcccatactcttactctccacctgcaccattcatctgaataaattagcctcactgagaggaagatgacagcaaagagcgcacctgcaatgtagtgtgactgccgcagcttagtaaggggtttccagggaagcggtttctaaaacacaggggaggagaattgtcagggtttggctccttgtgaaatttgcctgtcagaacagatgatgcgtttgggcataacacactccagtttgttcttctggcagtttctcttctcaatttcaaggctttcacagttttgctgcaacttatccttttaaggggctcttcttctcccatttctccattgactgttggtccagagaggtgagagattatgttgaaattgtctgcttaggactgatttgctgtagaatcaggccaatcacaacaacgggcccctccagcatctgccctcactgcccttgttttcagggcaccatccccccatcctccggtttgtctggaattggagggggtctgggggactgatgttccacaagccatgatcagactagttcagagggcagtgggctttttctggaaatgacatggggaaggatgtgaattttggaggtgcagggagagcaaggaaacgtaatacagatgtgatcatggtgtactgtttgtgggagctgtcttgtctcttaaaatcttgggggatgtttcagtttggaataataggtgagtagttaaggctagaatatgaagtattcatccagaagtgttcattggcaaatgttatactaacttgtgtcacacaggtatggtgtttctgcccattgaacctcaccacaatgttaaggaagtaaatcttattatcctcattctattaatattgcagttgaagcacagagaagtcacatgggtggtaagagttggcactggggccgggcgcagtgtctctctcctgtgataccagcactttgggaggcagaggcaggcggatcatgaggtcaagacatcaagaccatcctggccaacatgttgaaaccccgtctctactaaaagtacaaaaattacctgggcatggtggcatgtgcctgtagtcccagctacttgggaggctgaggcaggagaatcacttcaacctgggaggcgggggttgcagtgagccaagattgcaccactgcactctagcctagcctggagacagagagagactcaatctcaaaagaaaaaaaaaaagagttggcattgtaatgaaatctggagctctgagcctggtctatagatttttctagtatctaatctcccaagagggtaaaattccatttctaaagtatctggccttgctttctttaaataatggataataaggatgtggggggtggacctctgcgaaggaagaatttaaatatccagagggagagaatgcctctttagatttgtggtctccgtgataagtagagctgctcttttaattttatttcaaagttaaatgatagtagtgagtggaataaaggcaccaatctaagaactgttttccaattctctgctttcagctctaaaacaaagagaatttatcatttgccttcatatactgtgctgtgtaggtacccagagacagcaaaattccaattaaaagagtattgattgctcataaattaatgccatccattcagaatcgatggtcacttaatgtctttcaatgatttttattgtgagtcagctcagcccttgtactttgcttattaaatgttccagtataatcgtacgcctatttaacatgggtgattcttttgctattaacatatggttttcgattttcatccagttagcactattagtcattccacatgaaagtcagtgcaatctaacaaactcgaacaacttccctcacctactctcagagataatttatgtatccctcattcctctgagcccaaagcaggtaaacatttccaattaaactgaagagagtaatagaagctctccagaatagtaaaaaaaaaaaaaaaaaaaaatccacaaaaaaaccccaaacaaacaaacaaccttccaccctaccccccgcaaaaaaaaaaacaaaaaaacccaagaacaaaaaacaaacaaaccctcctaggaaactaaagcataaaaatgtcatgggaagttataactggatccgtaggggatataatttcattgcctgtaagcaaaatcgtgatctaatggttttcggagacatggggtactggacatctgtgaggggcctgtggaatcccccagagcattgtgctaattaagtaggaaagggaagcacgttgggaagccaccagatgtcaggctgaagtctggcagtaaagggagctggctaagctcaaggaacatacatttcaggagacagatgtgatcactgtatgaggcttgggtgaaatttatcttccagttcaatggctggaccaggacgtgaggtaacctgtggccaatcaggatatccttgtgactaatgttaatccttcagactcctcagatttcatcccacttctttgcattggtgtcacagctagagtccatgaaggataagcaaccgagcagcttctgcctacttttgcacttctattctgaagagagctgttcatttatttagccagtatctacttttggcattaggagcttttgagtgaggttgagggagtggaaaagagggcagaaatccaggagaggagcgcatcaaatgggaacattcctcagggaccaggctcctcgcgttctgatcctaggtctctcacacattggttgcaggtcatttaatttctctctgtttgtttgcttatctataaagaaattgtaccaaataacacatcccttccagagctaaaatttgttctactacagggtctagaatagcatcctccaactgttttgctcatgtacttgctaaaagaattttttaaaagggtgtgtacccccacattttaaagatgacatgccataaatttaattagttacaaaagatgtagtttccagcatattgtctattgcataagggttttaaatacatgtttttcaaaactgtgaatttagctcattccgcttatgatacatgtcaccacatcacctaattaacaaagccagttcttattgtcagatcattcagccaaataagacttgttttctgtcagaaaaagtctgactttattttgtaatttaaataaatacatcaacatgcaccctgctgacaatcatctcattttggaactccaattctaggatgaataactaattagatacttcgaaaactagtaagccagctagctaaagcagggatccttgccatgagttggccagccctttaatgtttcttaatgtgtccttaaagtactggtccttaagagcaatgtagtctccaattgtccctttgtttagtggctctgaggtttgtaaacaatgggacaagtcactgtgtcagtttcagattgaatgagagatatgcttttcttttggaaagtgggagaagggtcattatgagatgggaggtgggaaaaggagaactagcagcctgtagatacgttattaggcaaatttattttagaaacaatgcctatggaagttgagaatctggaaaagaatctgcttaaaatcaccatgatatgtatcccctggggagttttcatgtacccctgccaaggagtacacagcccggaagcacaaagaattggtagggggtaggatactctccactgtcatttcatgccaagcatttcaataaggccggaatggcaaggactgtcttttgttagggctggcagcccccacacatgatgcatactcccctttgaaatgaattggccatcaagcaactttctatgattgaattcccaggtctgtcgttagggtattgccactttatcacctaatatttactgagaatctaacttgtaggtgcttctgggaacataaaatataatttatgcaatttatgaagattcaaattttccagaagtcaggatgcctagaggcaaatacagtagtgattaaaagcaatgactctggaataatttgtcctaggttggaattcggtctctgcaattttgcttgtgttacggggatagcctctgttttctcatctgtttaaatagaagaaataatacctcttttacagtgtttaatgttttctccatttctcctcactccttcgtccatgtttcaccttctctgcaatgattcatccttgtagaccacatcactagagttcccttgccagttaattggcttccaatatttgctaaaaagtggtaccaggggagattggagggtgaggagagaggtgagatatcttttctaggccctctttgggccatacatgacaccatggctggatcccttcaaaactacagacaacttttgctgatggtcttgccttcatatttcaaatctaactctacctcacaggcttctcataatttctagtctctgaccataccatcagaatatatttactgtgatgtttcaaagtttttcttcaaaggaacttccctctcctttactcagtgggttctggatgtgagacgaggcttatatttggaaactgggcaggggatacccagttcatactggggtggctgctttacctttctgatcaccctgattataacagttaagcactagtctcatttgctgcccacttattttgcctctaggaactctgtcttctaccgaccacgtccttattctatcctctgccctctgttatgttggctctggcatttctacttcacttagtgtgtgacctgttgctttgcctaagcttccaagggccatcctagcagtgtatgagcattgtttcccagggtctttgccagagtgtcaaatctgtattctgagagagagcttctgtgctaataaactctccctcatccaactttacaattccctcctctcccctttgtctagcactctctcaggattcatttttggggtcataatctccaagtaccagctagtctccatcaaccagagtctgtagcacctttggtgctttcacttttccctcgaattggtccttaatcactcttagccagtcattatctcttttaatgaatcaatggcactcaacagccacccaattccatccttatatttgcctttcccctcaaatatctcaaaagccagacatactgtaccagttagtgctcctccttccactggcatcacatcccagtgtacaaccagtgaaaggcttaataattgcaccactgaagcatgcctggtgctatctatactctacctgccactagtggtggggcctctttgtcagccagctggcaggtgatgcagctccaaaatccaaatttagagtcttcttcctgggatagctcccggtatcaactcacttagattgggttctttggaaagagattctgagatgaggagctacaggtagaagtagaaagtttattggaggccaggcacggtggctcacgcctgtaatcccagcactttgggaggccgaggcgggtggatcacaaggtcaggagatggagaccatcctggctaacatggtaaaaccccgtctctactaaaaatacaaaaaattagccggatgtggtggcgggcgcctgtagtcctagctactcgggaggctgaggcaggagaatggtgtgaacccgggaggctgagcttgcagtgagccgagattgtgccactgcactcactccagtctgggtgacagaccgagactccgtctcaaaaaaaaaaaaaaaagaaagtttattggaaaagtgttcttgggagatacactggtaagaaagtcagggtggcaagattgggaagaccaagaagctgacctccatccaattcaattgcaagtgcggcttcagctgatcccaaggagccctctagagctgagatggtcctttaagttctctcaaatggaagcaaggcggatagacatttatatccctacagcagctagccattagctgtgggaccattctctgcagaaggaagtgtaaccttgggcaggagttctctgtggcagagccaattcccagtgtgggatgcagctgtgaaccctcagcaattgggaactgggtgcatccaccctcaaaagagaatctggacagagtacaacagcactacagccacattgcagtccaactctcagccccactgagaatgcaaaagatgaacaagaatgtcttttaaacacattttcttcttttgcttgtcaattttcagttcgtagcctagatatttccagtgtagcaacaaagacatttcaacagtggtcacagcaatggtaaaattggacacaaataaaaatggaaagttttgacagttttagctgcatttagttaaatattgtgtttatgctcattatttggcatagctcctgttgttcttgagagtatttcagaatatgcttatttaattttctttctttgccatttttactttattttttccaccacatttacttttctgcagttaactgacaataaaaacagaagtggaggagctcagaagtctaccccaaatgggccgggcgtggtggctcacgcctgtgatcccagcactttgggaggccgaggcgggtggatcacgaggtcaggagatcgagaccatcctggctaacacagtgaaaccccgtctctactaaaaatacaaaaaattagccgggcgaggtggcgggcacctgtagtcccagctacgcgggaggctgaggcaggagaatggcgtgaacccgggaggtggatcttgcagtgagccgagatggtgccactgcgctccagcctgggcgacagcaagactccttctcaaaaaaaaaaaaaaaaaaaaaaaaagtctaccccaaatgttccccaagcatgcattagtgacttcaaataccatcacttccgtattacattttgtctcccttatattcctaatgaggcttacctgcttttggttcttaggaaaaggtctgggtggaaaatatcagctattcttgccctagagagtcttgaagcaaacactaacatccactgtcaagcaaatgaaaagtctaaaagataggacagagaagctgttaagctttaccccaactgaaagtttgagttgaactaacttggacttgttctgctgactggctgtgcagttttggtgatattttattagtttttccttccttcaaaattatgcaaaggtcatggtccatcatgaagttttatttttaatgttctatttctttttgttgttatcaatcaaagaacattattgcctgaaatagttttcccattagattaggatgttaattggttgacagaaataattgcttaaaatgaaagaacctcctcttgctgctcaaagccgaggagcctgatactgtttgtgatacaggccattggtaaatactgttgacttgtgacctgtggttccccattcacttgttcttttttggaaggaacaagatgctcttcctgcctggggctttgctctgctcagctatgccaccctctgaaacatgtgatctgcattccaaatgcttcactgacaggttctctatcacccagcacaggtagatcactgtcattggcatctatgtgagtgatgagttctgtttcatcataaataacctgaatattcatgtcctagactattggtgacactggaaccttcctattcatgaatacaatactaagaacattgcatatacctattttgctatagtgagaaaagccctcaaatctcactctcaatattatagtaccctcccacccctccacccacaattttcaatgtttgattactctataaaaggtagataattatctgaatttataaacaacataaataattctcaaacatttcacacagcaactacagcatgagggttgagtcaatcagtcttaacagacactcttaaattcatctccagagcatttagcgagactgagaaagaagaaaaattctccgcattctaacattttcgtcctaggtgagaatatttgcagtcagaagctttaaaattgctgacagtggccaccacatgtctcctgggaatgtccacattctctctgcacaggggtgcctacttttttattttttatttttgagacagagtctccttctgtcgcccaggctggagtgcagtggcatgatctcagctcactggaagctccgcctcccaagttcacaccattctcctgcctcagcctccggagtagctgggactacaggcgcccgccaccatgcccggctaatttttttgtattttttttttttttttttttttttagtagagacgggatttcaccgtattagccaggatggtctccatcttctgacctcgtgatccacccacctcggcctcccaaagtgctgggatcacaggcgtgagcccttgtgcccggccaggggtgcctactttttatagagagatatataggggctaggccacagttgcacaatcccatttaaccagaactctcagagccagagaatatagacagccctgaaacatgagaaggattgagcataagcaatatttcagaagctgtttaaacatgtcattatctggcttttctatttcagtaatttgtaagcaagctgcctcctctataaacacatcagcaggaaaggagaaagccatgttagttattgcatctctactgcctgggacttggggagacaacatcaattttaatgcattgaaatgcagaagtatctttgagggaatcccatttggattggatctctttgagggaatcccttatttggaataagaccactggaaaagtctgggctactttaaggaaagtggagagatgttcattttataagactgaacttgcacatatttccatgagtgaataaagcaaatattaactaatggttttttttttttttttttgagacggagtctcgctctttcgcccaggccagagtgcagtggcgtgatctcagctcactgcaagctccgcctcccgggttcacgccattctcctgcctcagcctccagaatagctgggactacaggcgcccaccaccgtgcctggcaaattttttgtatttttagtagagacgaggtttcaccgtgttaaccaggatggtctcgatctcctgacctcgtgatccacccgccttggtctcccaaagtgctgagattacaggcgtgagccaccacgcccggccaactaatggtttttagctaacgttttccagcaagatttgggaatagaaatgtgaacagaagctcagcataattacttattgttctgtcctgctatgagcattacttatttcacacatgattatggtgaagtcttcaggctgagtctaagctacgctcatcattgggttcctacacatttgggtgcgtcttgagtcctgaaggagtcttttgagatggtagcaggggtcctgagtgtagcatgtgtctattacttttccctgggtggccataggtcctcatcctgggccctatgaagagggactacaagacaaaaattaaatataaaagagttgttttctaaaacttttctaaggtatgtaactcacgacagcactactttaaaggttttattgcagagtacagccagacccacctggacttagctatgagggaaagttggaaaggatgccagtcacattgtgtggccactgacactcttggtgtcagcataaattgtgctgtgccctttagacaaagaattgatggctgcctggcaacctttctgtattgtctctattactagtggttctcaactagtggaaattttgcttgccaggggacatctggaaatgcccagagatatttttagttatcacagcttgaaggaatgtaagtggttggggggagttttgcccaatgaagggatgcatttgctcaggttgcttgggcttgcttacagcatggcaaccagattttatgaacaaagccccaaacttggcatttttataactaaccttggaagtcacattgattcacttctgccatggtctgttggacaaagaagtcacaagggtccaactacatttaaaggaagaggacatagatactgcaagttcatgggagggatatcaagattgcattgtaagaaaaacaagcatgttgggagatattgttgtggccacctttggaaattacaatctactgtaagtaaaacaagaatcaatcaatataaatttaggcttgaatcacttctctttttttgaacgaaagataaaactgtaaagaaatatagagatacatggaaggatgatgttaaatcaatacaaaatgatcagtgagttaaaagttacaggttctaggaaacatggctggtgaatacaataataatttattaattttaatgtcagcttcaaatttttggttctttggaaaattgtttaggcccccaaatatataggtctatgtatgtatgtatgtatgtatgtatgtatgtatgtatgtatgcatgcatgtatgcatgcatgcatgtatgtatgtatgtatgtatgtatgtatgtatctatctatctatctatctatctatctatctatctatctatctatctatagctgcattgatgctgtaagtccagagcagttttgcaaaataggctgtgttgctagagagatgctattttccttggcctgtttttaagctgctatccaatagaacatattttttttcctggttgagaaaaaactggatatgatcaatataaaaaactggacaagacactgtgtggtattggttggtaatcagacaaagcttcttgctgtggagcacaccttcctttgatgtcatttgtctccatttattggaatgaaaacttctcagtgtatgaatctttagcaaacaaaatgaagaatgctgaaaagaagcacgtagcacatacacttgaaaaattagggagaaacaacattagcagaaaaatgttctttctgtttcacctgagataagtagcctatgaaatcttgtaatcattgaaatcataattttttttctttttctttttttttgttttttctgagacagggtctggctctgttgccccggctagagggcagtgctgcaatcacggctcatcgcagccttaatctcctgggctcaaacgatactcctgcctcagcctcctgagtagctggcactacaggcatgcgtcaccatgccaagctaatttttaatttttttttttttttgtagagatggggtttcaccatgttgtccaggctggtattgaactcctggactcaagtgatcagatcgcctcagcctcccaaagtgctgggattccaggcataagccaccatgcccagcctgaaattatgattttcaatagaactattggctactgttagatttgaatttcacagattgagtctggtaaactcattggtgcttattttgcagactgtactatcggtctcagcattgaacttttagagatttcttaaatgacgttatgggattatcttgcacatcgacattataataaattccttcaagggcagcccttgactgaagtaattttcataattacgttgacctgaaaaaatatccttgcaagagacactgtgcccatatatcacagaaatacaggtattgatcatcatgtaaagggaggactgtgccagtgttggctgcagaaggtgggaagatctgcagactctttttgttagaaactgttgcagattaggttccccaggaaacagactctgaaatagagatttgtatgcaggttttttggaggagtgctcttgggatcaatactctggaagaataaagaaagtagaattgggcagagggagaagttgaactttgatatagatgcaacaaaggcctcagcttattccatgggtcacagtggagttggggtagccctagaatgaaccaaatagaggttaaggggtcagtaccttatacattgatgttgaccatcactggacgtgggctgacgcagaagaagggtcagaactttgggtaaaatgactctctttagacaccggcagttcttggaatgaggctctgctgagaattctcagcaatcagtgtttgcagcaggtaggggaataattgtctcagttctgaagagggcattcctcagcatctactgcaaaagcttatttgaactgctgaggaatacagcacaattaatataaacctaggttctctaacgtagattatgatgaaagccttattttgaaggaatacagtttcattcaaaacccatcagcatcaagcccaagatctctcatactcgtaatatcatcaggtgatactggttaattccatggcagtgaaatgttagatttgtgccatttccagaagttcttgtgtaagatgcttcaacttctgcagattcacaacagttgtcatacttattgtgagatgaatgcatctccaagatagagatgtatgcattcgggatgaatttgttaataatcataaagacagtttaaagcatcaaggatgtttgtttttaaggccctttgtcctgctgctgaaggccaaattggtagcctggggttaaagctaaaaggctgtgttgtctgttttatctctgtatggaaaaattttgacttgccatctcaagagagccatcacagatgtctcctaagaaagaactggttcacattttggctttaacaccatcagaatgatctgattatagattctcatccataaggagatagtatatagtggttaaaagcatagactgctcaattcagagcacagttctgtcatttttttttcttagtgtccttgggaaaatcaagctctgtgtttctcagttttctcatctctaaaaatgggtataataatattgttataataatagtacctccctcattgcattttaaagattaaatgataaatatatgtgcatgacagaggaagtgatttgcaggtgtttgctattatactgctctgttttttttttttaaataagaatgagccagctttttctgtattaaattactgtaccatttgtcaatttgctggaggtgcaccttttgctgtaaggaaaaaaataaaatgaataatgttgattgaaacaaaagtaagtatttttgaataatcttggagttgacatttgaagattttccttagctctgtccatatggatcaggaaaagatgtaaaacaaacaaaaaaaaccttagtctagatctttgctgaaagagggtgagattgggagtttacttttgtgaagaacctgtgtctcacatctttgatgtattgtctcaattaatcatcagaactgtcctatgaggttggcactgtaattttctcctttctgcagacagaaaccaccccccgccgacaaaaaaaaaaacaaaaaaaaacccaagacaacaagaggttatgagtagaaaccagagcagagttttggctgtgaaagaaagtaagtcagtgtgacattactgcaatgctgcagagatagacccctatcatgtaatcacagtctgacaagatgtgtacagaatgcagatgagctggagtacttgtcacatgatgaccggctgcaaaggtgtttctcttggggtgacagcagaaccattaactttactttctctgaaatcatcttttttttgggggggtagttagctagttacttcaatagaataaaaagaatgaaaactcatttagcgatataattactaaattattgggcatatgtctctttaaaaatgtaatgcaaagccattcttgtgaaatagtgtttttggtgcccccaccccatacaccgttaaagattaagttgactaagcaagaaaaggtgttaacatttttgtcagagacccctgggaatcaatatatttttgttccaagtcaccttgtattgtagttctctctggatatttggagaaagaggagatagctagattaaagaacttttgtggtgaaaattactccacttgaaggcttgtctctatcttttctgcttcagaactttatgttgattttgtgtgtcggcttgcatttttaaaaactataatatggaatagaactacatttaaatcagggaaaaaagatacatatgtggttttgaaatttctaaaattttgcatttggatagttcctctgcagttgctcagttaacatattttctttttctataaataaaatgacttgcgatcttctctctattctaggaagtctcaaagctcttcccaaggagtaaatcttgacagaaaaagaaaagcaaatttttggggggaaaattgtgaaaaagagtattaaattatttaaaaatagactgatctggaaatcatggaggaaatgatgtttacactgtgtttaaaaaataaaaaacgactcagtggatatgcatggtcctttgcacttaataagctaaagaggttcagatggaggatgatacagtataattaaaataaaagcggggaatgaccacgaatcagtcatggtaaatcaaaagaataaagacatgaaaagactttttggtatatatcaaaccatttttgaaaaagaattatgtggctagagagagtaacaatgaaaaagatatgtagaaaaatttctaaaatataaaaaatattatgtttacacagctgataagtttttatatagtaaatatactaatatcagtgcccttctcctggttcctttgaatacaagattaatgcaaaatattttttaaaaatgtatcctcttttgagccagtgaaaagtgacactttttttttaaacgaagtcacttagaattatgaccagatggttaaagaagataaattttaagagttgatttttcaaattttaaaggaaactgctgttggttttcagtgtggttcagtgagcttcatagtgcatatttgcatatgaaaaatgcttccataatattgtatttaatttactggcaaacggctcgaatatatattgtgggtttacaatgccaaaatacccagttgatttgataaagctacaagtaaattttggagttgaagagaagggagtaataaatcagttatctgtcaacttgcagaacaaagaaaatacttacttacttccccatccccccaactcctttaaactggttgaattcatattgtttagacaaaatgtgattgcattagtgattagttattgattaatcatcttataaagattaaattatttgatttctttaattagttgattttttaaaaattggcagtgaaatccttgaaaaacattagacctatgtaaatagagcctgagtaaatactcacataatatttaaccaatatttggacacactaccaaggcatcttgttaaggtattgaactaatgactgaattctccaaccactgaaaaaaatgagtgatggactaattatgtaaaaatgtcttttatcctgcatgtgattaaattggtctgttatttgaatgaaggaacaaacctttctggttgtactatccaaatcattatcatgcaggcaccatttctgttatttaaatgtaattttgtcaactgtagacatcattgttgcttctccagcattaattccattactgccctgtgatagagcagctgctgacctggataattgacatgatctccagcttcagaagcggactctaattggctcagcccaaaatgcaatcccatctccttggttccagtaattggttcaggagtgtcacatgacatgaactgttctaatcagagtgaagaccatgatatttattcaaagttgtctctccttttgtgtggtgtggtgtgttgatgtgaggcctggaattgctgtagatactttgctatctagtctcaggataaagctgacacatcagggtgtgcggagagatcagtgaattacagagaaatagacgggagccctgatcaaaccatgccagaagcctaaaggtcttttgaacttcattagctgatgcattccatttattattattcagttcatttattttatctctatatatcatatataaatataataaacttatactatgttataaatgtttattatatttatataacttattacattatgttataaatatttactatatttattagtcagtttgtgttgggccctttagtatgtacaaatgaaatcatcctaagagtttcaacgactcaacagcaccatggccaggacctattattggtccttcatcttcacttccctacacaaaatcactaatatgagattcttttctcttctagctgcttctaagttgagtttgaggtacagcgaggtgtgaaggtaaagaaagctctccataccttagctttgaataaaccttcaaatatttggatgtagtataatttatttaactctttattttgaaataattatagatctataagaaactgcaaaaatagcacctagagtgcctcgaatccttcccttcattaccctcaatggtgaataatatataatcacagttcaatatcaaagcaagaaaactgacattggtgtaatactgagcaatgtttattttattttatttatattatattatattatattatattatattatattatttttgagacagagtttctcctctgtcggccaggctggagtgcagtggcacgatcttggatcactgcaacctccaccttccaggctcaagcgattctcctgcctcagcctcctgagtagctgggattacaggactgtgccaccacgctgggctaatttttgtatttttaatagagaaagggtttcaccatgttggccaggctggttgtgaactcctgacctcaggtaatttgctcacctctgcctcccaaagtgctgggattacaggcatgagccaccgcgcctggcccaatgtttattttttagtagaatgatttttgttttgagagaagttttgaaataaacactaataattcattcattcttatagctgggacattcattttagtaggttagcatatatatgctatatatatgtatatatgtgtgtatatatatacatgccatacatatgtatatatgttagtacacacatgccttcatgcaaagatacatatatctatttagaggatcagagtattattcaaatatttagattaatacattgtaaatagttgtagctttttttggacatattactaagcacatctgtaatttatttttattttttaatttctttttttgatacataataattgtacatattttcagcgtacatgtggttttctctttgccttctaggataccaaaactgaatagttcatcactttatggttccctaatattaagtagggttcactcattctttttaattcttttttctttatttttatctaactgagttatttcaataggcctgcttcaagttctgagatttttttttcttctgcctgatctgatctattgttgaagtgttcaagcgtattttttattttacttagtgaattcttcaattccaggatttctgttatttttaatgacatccattatttggcaatttttaaattcatgtgctgaattgtttttctgatttctttgcattgtttatctgtgttctcttctgtctcagtaaatttttttttttatttttatttttccagacagagtctcattctgttgcccaagctggagtgtagtggcatgatcttggctcactgcaacctatgcctcccaggttcaagtgattctcctgcctcagcctcctgagtagctgggactaccagtgcctaccatcacacccagctaatttgtgtatttttagtagagatggggttttaccatgttgaccaggctgttctcgaactcctgacctcaagtgatctgccagccttggcctcccaaagtgctggaattacaggcctgagttaccacacccagtctatctcactgagttttaaaaatatcactgtattttatattcctttcagtatacatacccaccaatgggattgctgggtcaaatgttagttgttttaggttctttgagaattttccaaactgcttttcacagtggctgaactaatttacattcacaccagaagtgtataagcattatactttctcagtaaccttcttaacatcttattttttgagtttctaataattgtcattttgactggtgtgagatagtatctcatggttttgatttgcatttctctaatgattagtgatgttgagtatttttttgtatacttattcaccatgtgtatgtccacttctgagaagtgtctgttcatgtctgtttcccatttttaaatggggttgtttgttctttgcttgttaattggcttacattccttatagactcttgatattagacctctgttaatgtatagtttgcaaatattttctcttattctgtaatttgtctgtttactctgttgatagtttcttttgctgtgcagagctctttaattaggttccattttttcttgatattgcttttggagacttataaatcattctaccaaaatgacacatgtacttgtatattcattgcagcactactcacaataacaaaggcatagaatcaacctagatacccatcagtggtggtctggataaagaaaatatggtacatatacactatggaatactaagcaatcacacatacacaaaaacaaaatcatgtcctttgcagcagcatagatgcagttggaatccattctcctaagcaaactaatgcaagaacagaaaactaaataccatgtgttctcacttataagtgggagctaagcactgagtacacatggacatagtgtgtactcaggaataataggcaccggagattactaaaggagggagagaggagtggggcaagggctgaaaaattacctgttggatactatggtcactacctgggtgatgggagcatttgtacccaaaacttcagcatcacacaacatacccatgtaaaaacctgcacatgtactccctgaatctaaaataaaagttgaaatttttttaaaaagaatgagttcacctaggatatactgcattttaaaataatttgatttttaaaaaatttaatttttaaactaatagtaaaattaactatttttggtgtacagttgaaacaattttaacacataaacagatttgaattcccatattataatctggatgagaagttttactaccctagaaatttcccttttgctcttcctttgtagtcaccccttcacctctcctccatcctctcaacccttggcaaatactgacctattttctgtcactctagttttgtgttttaaagaatgtcatctaaacagaattataaagtgtgtacacttttgagacttgacttttttcactaggcatgtttttgacattcattcaagttgttgcatataaaagtagttcattcttttttattgctgagtagtattccattctatggatgtatcacagtttgtttattcattgatttattgaagtgcatttgcattttttcccagtttttggtgattatcactagaactgctataagattcatgtgcagattttattgtgaacacaagttttgatttctctggtttaaattcccaggaatgcaattgcttaatcatatggtaagtatgtgtaattttataaaaaaatgttaagttgttttcaagagtgactttaccattttgcattcctgccagcaatatacaagagttacagatggtctgtctccttgtcaaataaaattgtttatttttagccattctaatagatgtgtggtgatatctgctagtgattttaatttgcatatccctaacaactaatgatcaatgttaaatatcttttcatgttcttttgaatcatctgtataccttctttggtgaagtttctgttcaagtctttgagttttaaaattggattattttcatactggtgagtttacaaggttctttatatgttctggatacaagtacttgttggatatgattttcaatattttctcttagtctgtagcttatctttttagcctcttagtggcgtttttcacagagtgaaagtgtttaattttgatgaaatatggtttatgagtttgtttcttgttggactaatgcttttgatataatgccaaaggacactttggctaattgaggtgataaagattttctccaattttttgaaatgttctatagttttacactttgatttaggtccatgatttttttaagttcgattttctgtgaggtataaggtttaagctgaggttcattttttatgtatgtatgtacaatttgtccaatcgtttgtggaaatgatgatcttttcacgatttgattgcctttccacttttgtaaaagaaatcagttggctcaagggaatgaaaagacaaaccacaaattaggagaaaatatttgcaaaaatatacctgataaaggactgtttcccataatatacaaataacttaaaattcaatgataagaaaaaataaagtcaataaagaatatattgatggaaaatgaacagaggaaaagatgttttgtatcatgtatcatttgggaattgcaaattaaaaccatgagatacggctctacatctgttccctgtcactatagacacctattagaacagctgagattcaaaacactgaacgcaaatgctggtgaggatgtggtgtaacagggatgctcattcattcatttctggtcagaatgcaaagtggtacagccacttttcaagatagtttagtagtttttcacaaacctaaatgtacttttatcatacagcctagcagttgtgctcttggtatttatagaaatgaattgaaaacttatatccacacaaaagcatgtacacagatgtttttagcaagtttcttcataattaccaaaacttggtagcaaataattttttttttgacagagtctcgctctgtcacccaggatagagtacagtggtgcgatctcagctcactgcaatttccatctcccaggttcaagcagttctgcctcagcctcccaagtagcttggattacaggagcacgccaccatgcctgctaatttttgtatttttagtggagatggggtttcaccatgttggccagcctggtctcaaactcttgacctcaggtgatccacctgcctcagcctcacaaagtgctgagattacaagcgtgagccaccatgccccagccccaagtgttttttaatagtgagtagataaataaaccgtggtatattcaggaaatggaaatttattccgcgttgaaaagaaatgagctatcaagccatgaaaagatatggaggaaacttaaatgcatattagaaagttaaagaagcccatattaaagtgttacttgttgcagagggtccaactatatgacattctagaaaaggaaaaactatggagacaataaaaatatcagtggtgccaggggcttgtgggtgtagagatagatgaacaaacagagcacagagaatttttagaaaaaaaacgaattgtccatatatgtgggagtctacttctggattccattctgttttattgctttatggtttttttgttttttgttttttttttttttttgatggagtcccactctgtcacccaggctggagtgcaatgacacgatctctgctcactgcaacctctgcctcctgggtttaagcaattctcttgccgcagcctcttgagtagctgggattacaggcacctgccaccatacctggctattttttttttgtaattttagtaaagatggggtctcaccatgttggctaggctggtgttgaactcctgacctcaggtaatacgccgcctcggcctctcaaaatgctgggattacaggtgtgagccaccatgcccagcctgttttatgtttttatccctccaccaatagcataagacagctttatagttagtcagcctatttcataatatagctttatagtaggatgtctatagtagtgttcttggtgttgcgggttactttcaattgttcctttaatgtgaagttttgtatcacttcttctaagtcatcttcatcctttttgtcactactacattccttatttatgtcaataggtttaccttctatcagttcttctggctgcatatctggagttccttgaaagcaacagtgtattaatctgttctcacactgctataaagaactacctgagactgggtaatttatgaagaaaagaggtttaattgactcacagttctgctggcttaacaggaagcatgattgagggcttcaggaaacttacagtcatggcagaaggtgaaggggaaggaatcacgttcttcacatggcagcaggagaaagagagcaaagggggaagtgctacacactttcaaacaaccagatctcgtgagaactcattcactatcacaagaacagcaagggggaagtctgcctccatgattcaatcacctcccaccaggtccctcctccaacacatggggattacaatttgatatgagattggggtggggacacagagtgaaaccatataaagcagtatcaacattctatcgtcagctatttcctctataactccatctgtgttgcattcagatttaacttctttctgtgctttcatttttgttggacaattttctcttttcattatccattaaaaaaagtcacatgggtttatcactaaggggaccaggagacaacatgactacatgctctgctatctgtgcatgaattgcataatgtacagtgataatcactgatagatattaaaataagttattgattagtcatgtatcatgatgcatatctgttattatgtagtgatttgtggactaaaatgctggaagcaaaacttgtactttatgaaattattcacatgtataccatagtaactgaaatttgaacagaatgatatgatttggctctgtccccacccaatctcatcttaaattcccacgcattgtgagagggacccagtgagaggtaattgaatcatggggggaggtctttcctgtgctgttctcctgatagtgaataagtctcatgagatccgataactatttaagggggagtttctctgcacaagctctcttctcttctctgccaccatgtgagacatgactttcaccttctgccataattgtgaggcctccccagccacatggaactgtaagtccattaaacctctttcttttgtaaatttcccagtctcacgtatgtctttatcagcagtgtgaaaacagacaaatacagtagctaatgcagtgttcggagggaaatttatggcaataaatgctcacacccacagaccaagaacagctgactttgaacactgttcacacaaagactttgaacagctccaatatacatgactttcagctaccactgtttaattaaatgtatcagtctctcaacaatactgttcaaatttcagttactatagtatacatgttgttaataattccataaagtacaagttctctagggagttccaaactttcccacattttgctgtcttctgagccctccaaactgttgcaacctctgcctgttacccagttccaaagttgcctccacattttttgggatcttttcagtagcatccctctctactggcaccaatttactgtattagtctgctttcacactgctgataaagacatactcgagactgagcaatttacaaaagaaagaggtttaatggacttacagttccatgtgcctggagaggcctcacaatcatggtggaaggtgaaaggcatgtctcacacggcagcagacaaaagaagacagcttatgcagggaaactcccccttatgtaatcatcagatctagtgagacttattcactatcatgagaacaacacaggaaagacctgccccatgatccaattacctcccaccgggtccctcccacaacatgtgggaattcaagaatatcagctacacttgcaaattttgatatgctatattttcattgttgttcacttcaaattattttataattttccttgagattttttttcacccatggtttacttggaagtttgtcttttaatttctaaaggtgtataatttttcctactatatttctgttatttctaatttaattccattatttcagagaacattcttcgtatgatttaagttctttgaatttgttaaggtgtattttataaccctggatatagtctattttttttatctgttccatgtgcatagaaagaaaatctattctgctgttgtttggtagaatgttttataaatgtcacttaattacagttgttagatggtgttggtcagttcttttatatccttgatgactttctgtctactatgtctattgcttgacgatagaggggttttgaagactccaattataattgtggacttacctatttattctttcagttctgtcagtttctgcttcttgtattttgaagctctgttcttagttgcatacatgtttaggattgtattgtctttggggtgaatgaactcttttatcattatgtaatttgcctttctatccctgattttttaaatctctgagtctattttttctaatgttaagtctactactccagctttattttgattagtagtttcatgatttatctttctctgttgtttcacttttaaatgacatagttcattaaaatgagtttcttggagacagcatgttattagaccattaaaaaatctgttctgacaacttccatattttaagtgacatacttggatcacttatatttagtgtaatttattgatgtatttgggtttaggtttaccatttattatttgttttattctatttctagtctttgtattcttgcttcgctttccctgctttattgtgtcttatctgaacatttaaaaattcagtttagttcatccaatgtatttttactattttttacatagtttattttatgattgctgtagaaattataatatgcatgcttaagtttttgcagtctacttagaaccatttttttcctacttcagacgggattcagacaacatcacataggttctaaaatgattgcttttaaaaaaactggatctttgattaaccatgtaatgcagacccatccttataacttttcttatgtcttagaagtatattacccaacatatagatattggtaagttaaagaaaaatactattttactctaaacaaatctattataatatcactactttagaaataagctatttgttaaaataatttgatgtgtatagagcagaggcttattaatattgaatgcatttatgaagatagaatttgatttacagggatttcccccctccaaataactgaataagtgagtgaattagcatacacttaacatagaaaatgagttttctgtgcatcaaaacgtattcacagaaaaactttcatttgtgatacttcttataactagtttctggaaaaagaaaataactgaattgtgactttttgacatagttaataaaaatgttgtctaccttttaaattctaataatactttagaacaggaattaaagtatggcttttattacaacaatatcaattagcatgtatgtgttgtttattttcatattttaattgctacttctaaacaactatataaaattaattccttcttaatatgagaaaactgaaaaatggagaagttaagtaatttcccaagatcatacatcttgagtaaaagaggcagaatgaaaattgagtagtatggcttcagaactcacaccgtgaagcaccatattatctgatccttagaggagagggcagtagtattttggtattctcaacttaagaatctttaaagttatttttaaaaagaagggcaatatgttgtatgtgtgtctttgtgtgagtgtcagtgtgtgtgttatgtatgtatatttctgtataattttttatcacaataagtttctaatttggttaaggattttgtgttgcttccataatgagaaaacgattctatcaggcattagtgtattctaatgctttgatgtttactttcaggcttccctttgatctctttacatattgatatgtgtacaaatagcatgggacaaccatgtcttgaatgccacatctaagaatggccacaagattacagtcttaaaactttaatgagcagaacccaaattggtaacattatgcatgtgatgataattgctctctaaagcggatcttttctcatgccattctccatttttttgaaggcttaatttaagaacactattcaccagcagttaaatggctactttattcttttctactttatttatttcccattctttttcagatgttgctttctgtaaatactggtctgaaaggaaaggttcagcaaatcaaattgttgaaggttgcaatgtctgagaatcggaaccagctttgctggtataaaatatgtaaaaggacattcccattatagaaatatacttttcttattctccagtaaaaaaataggaatatattaggcactacattcttcaaataatttgaaaattctactattctaatacatgatatgaaatgtcttaataagaaattgaacttaggatggataaatcttttgtgagaaaatgtgcctacagatattagacttctttcattcatcacttacctaatccctgtccctttctagatgttgacaaaacagaaaatgacaggtgattcctttgcagtatttacaatgctttgatatttatttttgtctttaataataatcatctatgaaaatttctgagacattttttccactatctaaacttcagtttttatttcctccttgttcatcagctatctctcttttcaattatttcattttagtatatgttggacttttaaagattggctttaatataaaaatgtacataatttcatggtaggagagttttcacagattgggcagaatcatgcaacatattcttttaataggcatttagaaaaagaaatcttagtacacattcgtatgtacactaaatagttctaatattttatgtgtttgataaatatgatgatcctggaaaatacatagcaatggtagtcccagttagacaaactttccattataattacactggccacaaaggcagtttgtttacatggcatcaaagagcctcacttgctacaccattgctaaatcctgagccctaggttttcatcagtgtcagttataatccaatgagatcaaaggtgaaggtgtgccaatgaaaaatcactcctgaccttccatcatggcagacaggaggcaggattagattgcagctccgactcagatggacagagaagcatgtggtggctagcactgtgaattttagctccagaatgactgcaggaataaatcatgaaaccggagaggacccacagaccctctgaagaaagtggattgcttctgcaggacccaggagacaccctagatactgtgattgcaccaactgtggaagtgggaaagggagatcttctgtccctaaacacacaccccccactggggaaattgaaggtctactttacaggagaagatcctgatcttacctggagctgagtcaatttagagagccaggcaagatgcaggggtacaggaagccatgggaaagccctgtaggctcggtgggtccccaaggccattcttgcctggcattaccgggattcttcaggaaggtggccagaggtgcagggaaaatgccacagggagaaggaaatctccagctgcactttgtaacggtttgaactgattgagaagcctcctggccagaactcgtgtgagggtgtgaatctggcatgcagactccacaggaggaagaacaactaaaaccctcctttctttcatagctgggaggcaggtagcctgaggcaagttctcagccctgcttacccactgcctagaaatagactcagtgctgttagtgggggcacggtgggaaagagagcagcccttcagattgcatggcagctgggtgaggcctgtgactgatggtttcccctacttccctgacaacctgcatgacttagcagaggcagccataattcccctaggtccataactccattgacctccattgaatatcacccccatcccccacagcagccacagcaagatccacccaaagtgagtactacatcaagggaatgccctatgggacaaaagaatctgaacaacaggcttcagccctagaccttctctgtgacagagcctatccaaatgagaaggcaacagaaaaccaactctggtaatatgacaaaacaaggctcttcaacacccccaacaatcacactagttcaccagcaatggatccaaaccaagaggaaatccctgatttacctgaaaaagaattcatgatgttagttagtaagctaatcagagaggcaccagagaaaggcaaagtgcagtgcaaggaaatccaaaaaataatacaaaaagtgaagggagaaatattcaatgaaataatataaataaaaaataatcaaaacttcaggaaatattagacacacttatagaaatgcaaaatgctctgcgaagtctcagcaatagaattgaacaagtagaatgaagaaattcagagatcaaagacaaggtctttaacccaatccaacaaagacaaagaaaaaagaataagaaaatatgaacaaagcctccaataagcctgtgattatgttaaacaaccaaacctaagaataatcaacattcctgaggaagaagagaaatctaaaagtctggaaaacatatttgttggaataatcaaggaaaacttctccagctttgctagagacctagacatccaaatacaagaagcacagagaacacctgggaaattcattgcaaaaagatcatcatgtaggcacattgtcgtcaggttatctaaagttaagatgaaagagagaatcttaagagatgtgagacaaaagcaccaggtaacccataaaggaaaacctatcagattaacagcaaatttctcagcagaaaccctacaagctacaggacattgggacccaatcttcagcctcttcaaacaaaataattatcagccaagaattttgtatccagtgaaactgagcatcatgtatgaaggaaagatacagtctttttcaaacaaacaaatgctgagagaatttgccactaccaagctactactacatgaactgctaaaaggagctctaaatcttgaaacaaatcctggaaacacatcaaaacagaacctctttaatgcatacatctcacaggacctataaaacaaaaatgcaatttaaaaaacaaaaacaaaacgcagaaaaccaaggtacacgggcaacagatagcatgatgaatggagtggtacctcacatatcaatactaacattgaatgtaaatggcctaaatgcttcactttaaagatacagaatgcagaatgctaagaattcaccaaccaactatttgttgccttcaagagactcatctaacacataatgacttacataaactgaaagtaaaggggtggaagaggcatcatgcaaaaggataccaaaagcaagccagggtagttattcctatatcagacaaaacaaactttaaagaaacagcagttaaaaaaacaaagaaggacattatataatggtaaaaggccttgtccaacaggaaactatcacaatcctaaacatatatgtacctaacattggagctcccaaaattataaaacaattactaatagacctaagaaattactaatagacctgagcaacacagtaatagtgggggacttcaatactccactgacagcactagacaggtcatcatgacagaaagtcaacaaataaacaatggatttaaactataccttggaaaaaatagatttaacagatatatacagaatattccatccaacaacagcagaatacacattctattcaacagcccatggacctttctccaagataaaacatatgataggtcactaaaagagcctcaatacatttaagaaaattgaaattatatgaagcactctctgagaccacagtggaataaaactggaaatcaacttcaaaaggaaccttcaaaaccctggaaatacatggaaattaaataacctactcctgaatgattattgggtcaaaaaatcaagatggaaatttaaaatattttttgaattgaatgacaatagtgacaaaacctatcaaaacctctgggttacagcaaaggtggtgataagaggaaagccccaaatgcctacatcaaaaagactgaaagagcacaaagtgaaaatgtaaggtcacatctcaagaaactagagaaacaagaacaaaccaaactccaaaccagtagaagaaaggaaataaccaagatcagagcagaactaaatgaaattgaaacaaagaaaaacaatacaaaagataaatgaataaaaaagatggtccttcgaaaaggttaataaaattgatagaccattagcaagattagccaagaaaagaaaagagaaaatccaaataacctcaataagaaatgaaacaggagatattacagctgacaccacagaaatacaaaagattattcaaggctaatataaacacctttacacgcataaactagaaaacctagaggagatggatacatttctgaaatgacacaatgctcctagcttaaatcaggaagaattagataccctgaacagatcaataacaagcagtgagattgaaatggtaacttaaaaattaccaacaaaaaaaagtccaggaccagacagattcacagcagaattctacctgacattcaaagaagaattggtaccaatcctattgacactattccacaagatagagaaagaggaaaccctccctaattcattctgtgaagccagcatcaccctaatacccaaaccaggaagggacataaccaaaaaagaaatctatagacatatatccttgatgaacatagacgctaaaatccttaacaaaatactagctaacagaattcaacaacataatcaaaaagataattcactgtgatcaagtgggtttcataccagggatgcagtgatggtttaataagtcaataaatgtgatacaccacgcaaacagaattaaaaacaaaaatcactttatcatctcaatagatgcagaaaaagcattcaacaaaatccagcatcggtttatgattaaagctctcagaaaaatcggcatacaagggacatacttcaatataataaaatccatctatgacaaacccacagccaacataataataaatggggaaaagttgaaagcattccctctgagaactggaacaagacaaggatgccactctcatcactcctcttcaatatagtactggaagtcctagccagagcaatcagacgagagagagaaaaaaaaaagggcattcaaattggtaaaaaggaagtcaaactgtcactttttgctgatgatatgatcatttacctcaaaaaccctaaagactcctccagaaagcccctagaactgataaaagaattcagcaaagtttctggatacaaaattaatgtacacaaatcagtagctcttctataagccaacagtgaccaagcggagaatcaaatcaagaactcaaccccttttataatagctgcaacaaacaaacaaacaaacaaacacacacttaggaatatacctaaggaggtgaatgacctctacaaggcaaactagaaaacactgctgaaagatatcatagatgacagaaacaaatggaaacacatcccactctcatagataggtagaatccagattgtgaaaatgaccatactgccaaaagcaatctacaaattaaacacaattcccatcaaaataccaccatcattcttcatatagttagaaaaaacaattctataattcatataaaaccaaaaaagagcccacacaaccaaagcaagaataagcaaaaagaacaaatctggaggcatcacattacctgatttcaaactacattataaggccatagtcaccaaaacagcatggtacttgtatgaaaatgggcatgtagaccaatggaacacagcagagaacccagaaataagcccaaatacttgcagccaacttatcttcaacaaagcaaacaaagacataaagttgggggaaggacagccttttcaacaaatgctgctgggataattggcaagcaacatgtaagagaatgaaactggatcctcatctctcatcttatacaaaaaaatcaattcaagatggattaaggagttaaatctaaagcctgaaactataaaaattctagacgacaacattggaaaagcccttctagacattggcttaggcaaggatttcatgaccaagaaccgtaaagcaaatgcaataaaaacaaagataaatagctgggacttaattaaactaaagagcttttgcatggcaaaaggaacagtcagcagagtagacagacaacccacagagtggtagaaaatcttcacaatctatgcatctgacaaaggagtaatatccagaatctacaacaaactcaaacaatcccatcaaaaagtgggctaaggacatgaataggtcattctcaaaagaagatatgcaaatggccaacaaacatgtgaaaaatgctcaacatcactaattatcagggaaatgcaaatcaatatcacaatgcgataccaccttactcctgcaagaatagccataatcaaaaaataaaaaaatggtagatgttggcatggatgtggtgatcaaggaacacttgtacactgctggtagtaatgtaaactagtacaactactatggaaaacagtgtggagattccttaaagaactaaaggtagaactaccatttgatccagcaatcccactactgggtatctacccagaggaaagaagtcattatacagaaaagatacttgtacacacaggtttatagcagcaaaattcacaattgcaaaatcgtggaaccaaccaaaatgcccatcaatcaatgagtggataaagaaactattctgttggaacaattaatggaattatctctttgaagagtcccagactgagtcaaaaaaccatatatatatacatgtatatatatatatatgtgcatacatatatacatgtatatatatgcgcatacatatatacatgtatatatatgcgcatacatatatacatgtatatatatgcgcatacatatatacatgtatatatatgcgcacacatatacacacatatatgtgcacacatatacacacacgtgtgcacacacatacacacatgtgcacacacacatgcatacatatatacacatatgtgcatacatatacacacatacgtgcatacatatacacacatatgtgcatacatatacacacatatgtgcatacatacacacacatatgtgcatacatatatacacacatatgcgcatacatatatacacatacatatgtgcatacatatatacacatacatatatacatatatacatatatgtatgtacgtatatatatacatttatatatcacagtttatatatgtgtgtgtgtgtgtgtgtgtgtgtatatatatatatatatatatatgagatggaatactactcagccatagaaaggagtgaattaacagcatttgcagtgacctggatgagattggagactattatgctaagtgaagtaactcaggaatggaaaatcaaacattgtatgttttcactactatgtgggagcttagctatgaggacacaaaagcataagaatgatacaacggaccttgaggacttgggaggaaggatgggagtggggcgagatataaaaaactacaaatagggtgcagtgtatactgctcaggtgatgagtgcaccaaaatctcacaaatcaccaccgaagaatttactcatgtaaccaaacaccacctataccaaaataacctatggaaaaataaaaaataaaaaggaaatgaatttgtagcaacagtccaaattaatagctacaacagaagtgtagtttccaggtagaccaatggataatacattcctttacttgcaagacagcctgcctataatgcagaagaaaaatgcaatagttgggataggctaagttagcctgcggcaacaagcaattccataactttagtggctcacaacggaaaagagtatttctcgttggcactgcatatctatcagctctgttccacgtagtattcactcaggctgttgaggcaaaaggaagaaacgatcatgaactgcaggcgcgaggcactaaaaggagttggaagaaagaatatttggggaaaagtaatatagtgtattagaacaattaatggaattatctctctgaagagtcccaggctgagtcaaaaaaccaggttccacttctttcttggctgcctaattcttaacacttggacaaatttatcttgaacctctctgagcttcattttcacaatccagaaaataaggggatggggtcccatgactcttaaggtgccttccagcttggaagctgtgtgatcagaggctcctgatggctaaaatagggaccctttcaccagctaggacctggaactcatcaccaaagtttttctctaaaaactcttctgaaagacaaatatcacatgttctcacttatatgtggaagctaaaaaaaaataaaaaaaataagaaaataaattaaaaaattgaactcatggagaaggaagtagaatgatggttaccagaagctaggaagggtagcggagagggggtataaagtggggatgattaatgggtacaaattacagttaaatagaatgaataagatccagtattcggtaacacaatggggtgactatagttagcaataatttattgtatatttaaaaataaaacagtgaaattgaaacagccctaacacaaagaaatgataaatgctcgaggtgatggataccgcaattaccctgatgtgatcattacacactgtatgcctatatcgaaatatctcatgtaccttataaatatacataattatattcccataataattaaacattttttaaaagaaaaaagctactcctatatacattaatttatctgactttagcaaaaagagctaggttttttgtacaagtgagataaaaatttcattttgaacaaaggtggcgaggtggccaggcatggtggctcatgcctgtaatcccagcattttgggaggccaaggtgggtgaatcacgaggccaggagttcgagaccagccatgccaacatggtgaaatcctgtctgtactaaaaatacaaataaaatagctgggcatggtggcgggcgcctgtaatcccagctacttgggaggctgaggcaggagaatcgcttgaacctgggaggcagaggttgcagtgagccgagattgcaccattgccctctaacccaggcaacagtgagagactccatctcaaaaaacaaaaaaaggtggagaggtaatctctgacagagatagctaatctgatctctgatcttgttttgataaaagccttgattgctaataatagtcacatcatttttttcatgtaaatttttcctctttctggtgtcatcagaactttcagcaaacatacccttcttcacatgattttccagtgtacttctggttcatagacttaatcacacaatatgaattattcaaatcagcaagaattatgaaggaggaagcaatctcaatattttcctcttgttctcagaatagtgcacactttcccacctctgttttgaagagaagatggaagatgtggatattaaatccaacattgcacacaaatactatggcaaggcagttagtcaataaggattgaaaaaaatacataggagtgtaaattttatcatttcctttgaccattatttaaattattcaaaaattagctgacagtatttttattagatgtaaattttttcttttaagagttggaaaatttcagaccacaggagaagcacatacaggcagattgaaataattaacacatagtttagacaacctttgcatgcttgcatagcccagaatatgttagaatgatgctttccgttgagaatagtggataagagatgattgccatctgggaggagatgaagacggggagatggagagacagatagatgaacaattaatttgacaactatagatatgtcaggttgtatgggaaggcagagcaattaatttaatcccgactgaatagctgggaaggaaaaagaggaaacattgtggagaaaagcacaaaagtctgaatgcttgtgccaatgacctagaagtagagaagaatccagtgtgcctagaaaatagagtgtcggatagaacagtaggaggggcctaggcgatgcgctgtgaagacgaccctggaggccacgctggtgagttttcgcttttttgaaaaggatgagatgtagaaagcggggtggatgagagactttatcactaatggtctgtctctcattggtgaatagatatgagttagttttgatcaaaatgctgaatttgatagacaaaaatttattgttcaaaaatatctgatatggaatatagtttatatcaaatcttttattattttgagacagagttttgctcttgtcgctcaggctggagtgcaatggcatgatctctgctcaccgcaacctctgcctcccgggttcaagcgattctcctgcctcagcctcctgagtagctgggattacaggcatgcaccaccacatccggctaattttgtatttttagtacagatggggtttctccatgttggtcaggcttgtctggatctcccgacctcaggtgatccacccgcctcggcctcccaaagtgctgggattacaggtgtgagccaccgtgcccagccagcttatatcaaatcttattttacattggacttcatgggttttcacctcccatctcctcccaatatgttacttccaaatagtgatttattaaaaaaaaaaccaactctacaaatttgcttctctgactgattctgtgacatttgcccatacgcacacatacaaataaaacaaaagaaaattgggcgtaagaaaatattttttccatactaggttttgagaaaaaattgaaacagattattcaaccactatatacaaaattgaagcagcaagataatttcatgcaaaaaatttctccttatcaagacattttatgcttttaagggaaataaatatgtgttctaaagccataactttgtcctacagagaatttgaagaaatccagtttttccatgatgatgttatccagaatttaattacataattaaagaagatttgctatgattaggaaatatcaaggcatttagaacaagataaattgtagtttcaaaaaagaaattcacacccttctatagatgctccaaggcttttatgcacacgcagaggtttagaacaaattcattcaagcacttaaatggtaaataatcctaacgtgaatatcagttcattcctaaaacatcactgtttttatggaagtttgaaataagattaaaccaatttttatttaagacctataaacggttttgattaaacaactaaattctctttcaaaataaagctaatggccacaaagaatgatatgtatgtaaaggaaaatcttcagcattcttttgcagctgtgtactgcttggctggtggagggctctaatatgaacttggacctctgccgatgggcttgctgcgatgcatgatgtacagacacctgcactgatagccatgagattcatgctgttgtatcaatgtcatacctcacaggcctaacaagtaagtacaaacctaggaagtaagaaaaacattcacactgaaaaaagactagctggggatctgatatttcttagtttgtaacctggacagaagtctcccatacagaactccgctggcaatccagatttgggcatcatcttttcaacaaacatttgagttccttctacgttctagtgaggaggaagttgtagacagcttgggcaaggctcctgctgtaagatagtgtataagacagacattgatgaaatagtaaagaggcaaataagatcattacagattgtgatcattgctatgaagaaaatcagcaagttgatacctaagagagtaaccagggcagggccttatagagaaagtaataggaagagtaaatgaaacgatacagttgaggttaagatttaaggacgtgaatgtgctcgacatccaaaaagccatgaaaaaagaattccagaggaagggcaaaactcttgaagagaaaaggagctttcatttgttcagcaaatgctgttatgcaaaacctaagtgtaatgacaaggagcgaagaaattcatgatctgatagcttttgttcagtatctatcttggccatatcttgagactatggagtggcattgatggcacctatatttctattttatttttattttttattatactttaagttctagggtacatgtgcacaatgtgcaggtttgttacatatgtatacatgtaccatgttggtgtgctgcacccattaacttgtcatttacattaggtttttctcttaatgctatccctttcccctcccccaacaccacaacaggccccagtgtgtgatgttccccaccctgtgtccaagtgttctcattgttcaattcccacctatgagtgggaacatgaggtgtttggttttctgtccttgtgatagtttgcttagaatgatggtttccatccttttttgtggctgcatagtattctgtggtgtatatgtgccacattttctttctctcttttttttttttttgagaaggagtctcgcttggtcgcccaggctgctgtgcagtggcatgatcttggctcactgcaagctctgcctcccggattcacgccatttgcctgcctcagcctcctgagtagctgggactacaggcgcccgccaccatgcccagctaattttttgtatttttagtacagaaggggtttcaccatgttagccaggatggtctcaatctcctgacctcatgatccacctgccttggcctcccaaagtgctgggattacaggcatgagccaccacgcccagccttcatgccacattttcttaatccagtctatcattgatggacatttgggttggttccaagtctttgctattgtggataggatggcacctatatttcaacttcacttttgtagctcatgtgtcctttgaggcagcttgatttttaagaatcaggtgatattagctagaacctcttcccactgggggtaaaagattgggagggggagcagcacaggcaggaaacacagataaaagtgtggcttgcattttttctaatcttttctggcttggagtctttaattttgccaacaaaatgcaggaaatgacatatttagccattttgagaattcttatctttttcctcacctagttgctcccagtgagaactatcaaggacacaaggcatttgtgtaagttgtcaatattaccgaagacatagggtaatagaaagggaggttactgctcagctttatagcagatgaactgttgagctgaatatttcacattctgcttctgtggagtcccttgagcatttccgtcaactcagattctaggtttctttcccatctcttttcttcttccttttaaaaaattaaagaagttttagttgatgaataataattgtatatatttatggggtacaatgtgatgctttcagatatatatacacacatcgttgaataattaaatcaagctgattaacatatccatcaccacctacttagtattttgtgtgtttggtgaaaacatttaaaagctactcaacaattttgaaatatacagtatattattattaacaatggccaccatgctgtgcaatagtttcagttagacaggaggtataagttttagtgatcttcccctttaactgctcccagcaactccaacaaaatcctgcttagcagccttcagagttgccaacatttactccttctttgagggctcagcattgccagttggaatgatggtagctgttggcttggtgtgacttgaaagcctagcctgccccagagtgtttccatcagtggtcagacaacagcatctgcaattcttactattacagcccttcttctgtcttactcatgacctccagaagagccctgagtctgctgcccagaagaagaaaacctcataaccagttttcatgccccatcagccattacaattttttttttaagggaaaagtaattcttcaggttggttggagagtagagacaaagaagggggggaatggaaaaatagcccaagcttctaccaggaaagcagcatgatccatgatgggtcaaccctgagggctagggtaagagtgggagtatgtttagatataggacaaggtggctttgtaggtatagaatggaagcaggaactccaaaggataggtttgtgcatgcgtgcggtacataccgtgcagaggagaaaagatactggcttcaagctttgtgtatggctccctctgatcctataacccagactgactcagtgaccttgcctgaccttagagaaattttgcagacggactacctcatgagctcaccaaagcaaagtagcttggatagttctatattttagctagaggcaagaatctgtactaaatataaaggtttgctgccttgttttttatttgcccttaagaatttttatattcaatataatctatatttttcccccagaaggactcagtagattacctccttattactgatttatttaaaattccagttttagcagagagaggtttctctttagtctttccacagacaggtaaaatgccaaattaaacatgtaaggagtccaagtaaaaggaatactgattaatcggtatcttatttatctttggaacatttagcaatcctctttctttaaatagggaacttatgggccgggtgcggtggctcacgcctgtaatcccagcactttgggaggctgaggcgggtggatcacgaggtcaggagatcgagaccatcctggctaacatggtgaaaccccgtttctactaaaaatacaaaaaattagccagacgtggtggtgggcgcctgtagtcccagctacttgggaggctgaggcaagagaatggcgtgaacccggggggcggagcttgcagtgagccgagatcgcgccactgcactccagcctgggcaacagagtcagactccgtctcaaaaaacacacaaacaaacaaaacaacaacaacgacaaaaaatagggaacttgtgaatcattgacattgggatgtaataatttatatatacatttatgacttacttttaggatttttaaaattatgattttatcttgatttccaccttagtttacaaattttggaaaagctggtattgatttcttatatatatttattcaaatcatttctgaatttatgtttaaaatgttaaagcatactgaattgtataaaaacaaaataaaaagtgccttgaatccttctatcactacccagaatgatccactattaatatattggtctactttcttcttgtcttttttctattcaggtatattagtgcgtatataaatatacacactaacatacttaaaaggtgtatctatttatacctaaaacaaatttgtaatattctgaataagtagttttaaatgatgctttgtcacctaacaattgtcattgggtatttctcataaacatgaatttaaagcatccagagaataagaacgtatggaggccccatattttattttaccaccccatgctgttgggcattctagttgtttcccattgtttgttatttactataatattataatgaatatttttgaatataaaatttctatttccctttgaaataattaatgggtcaaagggcatgaatggctatttaaaaaatacatttgatgcatattttaaatgtacctctggaaggagtctatcagtttctctcttcacagtgtttctctcttcatagtttctctcttcatagcatcatttcattgtattctcatggataccgggtaatatgatgctatgaacaacttggccagttttctgggcaaagctgtcatggtttttaaaattgtttttatctttttatcttcgattgctacattattacctccataagaaatattctttttccttcccctttttaagtcttaaaaaataatcacaatacttgcctcataaaaaaattgggaaacacaaatgtgcataaaatgctaagtacctattaggaattattgtttttaagccattatggtgacaatgaaaaatcttcagaaatgataatcagttgcaaagaacataccctatgctttgatatcctaatcttagacagatgctcctggtgcccacgttgcctttattcagctctcttctgattttaaccacagtgtggtagacagttcgtgaaagctcatattcttctcttcctgccaggatgttgctggaagctcttgcagctgtctcttacattcttccccagggtctttttcaacagagatctcgcagctggcttgaattttgctgtctaaaggtgcagggatggggagggattaatgcctagaggacatccttcaaccaatgggagatgggaggtagtgaaaaaatattccaatttcctatatttctggtagacaattctgggaggcattccatgtatgcttctcagagcttctggcagagtcccactcttgttgcttacagcagaaacctcagtaaagcaccatataatgtcttttctctctttgtgtctgactctcctcccttatttctgtttcctaggagcagtttggaaataaactaactgcaaccaagtctttgttctaggctcttctccgagggaaaccctaactacgatatcgtccctttccctttttctccaacaatgcagagttctttccccttcccttggagaacactcagttaattaactcagccattgcatattgagggtcaatcctatgccaggcactgctttgtggaggatgcgaagacagactcagattctggccatcttggagctatattctagtggagcaggcagaaaatgagcacaataagtaagcaagatgttagacttcagaagtgctaaggggaagaaaggaagaaaggtaggaaatgtctggggaaagaggtgcattgcaattttagataggatggccaggagaggctttattgagaaggtctcttttgcgtaaatatctgaagaaggtgagccacatcaagatatgtcggaaaaatattccatctgaggaaatggcaaatgcctgagccctaaggtaggagtacttctggaacacttaggaatattgagaagaccagtgtggatgaagggaggtgaaggagaatgaggtgctattgccagagaggaagcaaggtgatagacagatcacataggaaccttaaggtctttggtatttaccttaagttttaaaatttatttatttatttatactttatgcaaatcaaaagtgacagggaagcaatgactttatctattggagtcttaaaattgatatataatagttgtacaggcctggagcagtggcttacgtctgtaattctgcactttgggaggccaaggcaggcggatccccaggtcaagagatcgagaccatcctggccaacatggtgaaaccccgtctctactaaaaatacaaaaattagctgggcatggtggcacacgcctgtagtaccagctactcgggcggctgaggcaggagaatcgcttgaacctaggtggcggaggttgcagggagccgagattgtgccactgcacttcagtctagcaacagagcgagactccgtctaaaaaaaaaaaagttgtacatatttttggggtacatgtgatgttttgatacctgtgtaatgatcaaattagggtaattggatgtccatcacttcaaacatttatcttttattgggaacattaccattcttttcttctagctattttgaaatatacaataaattattgttagctataatttccctattgtgctatcaaatactgtaaattattccttctatctaactatatattttaagtttgatggagaattactgaagaatattgaacagaataatctcaaggtcaaaaggattattctggctgctataatagtcttcaggagaacaagggtggaaggagaagccagttatgaattatcgcaataatccaggagagagattatggtgatttgaacctgagtcttagcagtggaggtggtgagaagcattgagttctatatattctgaagctggagttgacagaatttgctgatggatggggtggagagagtgagagaggtaaggaggcatagacaattccaatgtgtttgggctgagagactaaaataattatgtttgccatttactaagttgaggaagcaagcaagaagagaagattggaggggtgtatgggagctcaattttccacatattaaacatattccctatttattactttccaggaggaatgtcaaggaaaataggtgattgcatatatgaatctggatttaagaaacaaggtcagggctagatatgtaaattagagagtcactagtatgtagatgatattttgaaaccttggaactggatgagatttgcaagggagtatgtataatagagaaaagaagaaactcaaggttgatatattaattttctagagctgtcataacaaaataccacagactggatggctgaaacaacagaaattaattttcttgcagttctgatggctgaaagtccaagtcaaggtgccagcaggggtgatttatttggaggcctctctccttggcttgcagatggctgctttctcagtgtgttttcacatgctctttcctctgtgtgtgcatatccctggtgtcttcatcatcctataaggacaccagtcatattggattagggcctctcccttattccctcatttaaccttcatattacccctttagaggctctattcccaatacggtcatattctaacatactgggggatagggtgtcaacatacacatttttagggggaacacaattcagtctataacacgtggatatcttggacattctgaaattagaatggaggggagataagaaaaaataatcaaataagactgagatggagaggacagagaggtttagagaaaaaattggagatatatgaaataaagaaagtactttgaaaaagaaaaaggaaacaattgtgtcagaggttgctgctatgtcaagtaagataaagactaaggattgaatattgaatttagaaatgtggaggtcacagttaccttgataagattagtgagtggtagagtgctgggggtgagcgtctaactggagtggattcaggattaaataaagaaagaaaagccagaagcaagaaataaagacagctctttcaaggagtttttaaaaaccaattgcctaagaacttcatgttgtagtctttaatttcagccttattaatggagaggggcaagattggtgaattcattgacatgcaggaacatggagtaagcttcacaaaattaggtaaaacttggacttcccactctaagatggtgtggcgggtagaatagcggtcttctgaaaatgtccatgccctaatctccagaaccttggataatctttgctaagccttatactcttaacagagaaatacagagacttaagatggttaaaatgaactctctctacgggaaacatccaacagagacatgttactgccctgagctctctagagggactctttctccttaactttgcttaagcctgccaagttagctttctttttgattctgtgaactaaacagaatctttccaacaaagtcttttgtttacctaagtcggccagagttgcttataaggaaagagacctaagtgacacactgttccttccatttggaatgcctcacacaacccaatttcatttcagtttcacttgctgtgtcccatctattttactttctggacttgatagtgtgatggttaatattaggttgtccacttgactggattgagagatgcctagatggctggtaaagtattgtttctgggtgtgtctgtgagggtgttgccagagagattgacatctgagttggcgaactgggagaggaagatccacccttaatgtgagtgggcaccgtccaattggctgtcagtgcagctagaacaaagcaggtggaagaagggggaacaagctcccttgctgagtcttctatttttcttcccataccagacacttgctcccacacctgcccttaaacatcagactcctggtttttcagcttttggctgggactgaaggctgcactgtcagcttccctggttttgaggccttcagacttggactgagccactactagcttttttctttccccagctcatggacagcctatcatgggactttgccatgtcgtcatataagccaattcttcctagtaaactcccttttatatatacaaatattctattggttctgtcgttctggagaactccaatacagatggggttgtctactttacctttttcctggagtcttttctttactgattgactggatggcaagtaaaaaatagctctaatttgtgcaggtgcagtggctcaggccagtaatcccagcattttgggaggtcaaagcaggatgattgctggcatccagaagtgtgagaccaacctgggcaacagagcaagaccctgacactacaaaaaaaaaaaaaaattagtcaggcatggtggcatttgcctgcagtctcagctacttgggaggctgaggtagcaggatctcttgagcccagaagttgaggctgcaatgagctgtgattgctccactgcactcagcctgggtgacagagtgagaccctgtctcaaaaaaagaaaatcgctcaaatgtactacagtgaacttccactgttagaactacagttggatttttctctcctaatacctattccagccccgtgtggtagggaaccaggaaaccaaattcatatatcctgctctctgctgatacagatagctatcaaaaggccgtaagttgaacaaaatgccttagcaaaatgagagcagtgttaaattgttctgttttagagtggtgtgtatatcagaagttgattatcacaataattctccttaataaacaacaaacctcagtggttgataacaataagcatctatttagcttatgagtcgacgggattcagctgatcaggcctgggtttgactcttctcatgtgtttactgtcagctgtaggttcagtaggtgactctgctgtccttgggtgggccctctcacaaatctaggtggcatctaaggtggccttggcggagatgactggggcaactcagttctgatccttgaatctctcatctttctcctgggacgagaggggcagcttggtcaagttcttatggcagtagcagagggtaagagcaagcaagctccaccatgcaaatgtctcaggtctctgcttgtgccacacttgtcagttgtctccttggggcaactcaggtcattctagctccagagctcccaaccagttggccaagactcactggacctgcaacagagctcacctattccctctgcccaattttgcttctccgaaagcaagtcctatggctgagtgcggaatgagagagcaccattgagctatacgcacgtggtatagagacaaggaagactgacaaactgggaccattattacctttgatctatcacagggtaacttttcttatttctttttcttctgtatttgtgttttatgatctttctacaacaaatacctgtagcttggttcataaagaaaagcttccaggcaagagcagattgaaataatcaaaaacttaggaaaaactgcatagtatacacacttggctatcacattggctaaagtacttagtaatctattgaaatttaccaaagcagctgacttgatgaatacttgggttattctcaaacttggttaagtaccccctttcctttttctattcactgtggctagagctgataaatgaatgctgaaatgtatattgctcttatagacttgaatgtactagcagcattcttgctgggattaagtgttgcatgctgtcctgacagaaacgaaactcaatgacttgtctatttctgtaagctgaatacagtgagtttggaatgttgtacaactctaagactgtgcaccaaaatgctcaggactggtgtgttccccgttgcaaaaagcttacattcaggtgaaggagaaagcaaaataaataaataaataattaattagatagctacaaatggtggtaactttgtgaaataaattaacaagagagtaagacagagaatgataggggaaggtacctcttttagatgggtgatgtggaaagacctctctggtgatgtagctcctttattttcttatttttgcataaaatttttagagtgtgaggcatcatcatgatttcagagacatgaggcatgtaacttgggacaaatacatgactgtatttggttgaagatgtttgtcatttttgcattgtgccctatggctaaaatgttctgattttgatcatgaaacaaaattcaccacagttatggttcaattgtcaaggaagaaagaaatactacatcaccagagaggtctttccacatcacccatctaaaagaggtaccctcctctatcattctctatcttactctcttgttaatttctttcacaaagttaccacgatttgtagctatttaattaattaattatttatttattttgctttctccttcacccgaacgtaagcttcttgcagcggggaacacactagtcctgttgatagtgacactcctagagtccagcacagtgcctgtttattatatgaatgaagatgcaccgtcattgaaatattacacttaggaaccatatgtattaattacccaattcacctatttaaaaaactcaatggttataaaagtaacaacacagtttttttcctgctaaaaatagacacttgcatgtctgctagaggctccgtttaaaaatactttcaatctacacttggttaattataaataatattcactctttagtagtggtgggggttgtatgatcagaatcagaagtgcaggtgattctaatacatttatgaagaaataactctctgggattcatggtaattgatgtactggcacggtaaactttccaaggaatgttgattctgaagaaaatctgcagctggcgcagtggctcacgcctgtaatcccagcgacttgggaggttgaggcgggaggattgcttgagcccaggagttcaagatcagcctgggcagtataacaagatgcccatctctttaaaaaattaaaaaattagctgagcatgttggtgtgtgcctgtagtcccagccactcaggaggctgagtgagaagatagcttgaggcccaggaatttgaggctgcagtgagctatgattgtaccactgcactccagcctgggtgacagaggaagactctgtcttaaaaagtaaaggaaggaaaatctgtaactcacaatctattcaataaggtactgttccgttgtttgtattgattatatgggcagacttaagagaatgtgtttgtgtgcaggcagtgaggtagtgtttgcatgtgtttgtgtgggtgtggttaagattatgtgaaaacagatgaaaaggttacaataagaaaacattagaaaatccactgattcttttttcttttttttctttatatactttaaattctagggtacatgtgcacaacgtgcagttttgttacatatgtatatatgtgccatgttggttcgctgcacccattaacttgtcatttacattaggtatttctcctaatgctatccctcccccatccccccaccccatgacaggccctggtgtgtgatgttccccaccctgtgtccaagtgttctcattgtttaatttccacctatgagtgagaacatgtggtgtttggttttctgtccttgggatagtttgctgagaatgatggtttccagcttcatccatgtccccacaaaggacatgaactcatccttttttatggctgcataatattccatggtgtatatgtgccacattttcttaatccagtctatcattgatggacatttgggttggttccaagtctttgctactgtgaatagtgccacaataatcatatgtgtgcatgtgtctttatagtagcatgatttataatcctctgggtatacacccagtaatgggatcactgtgtcaaatggtatttctagttctagatccttgaggaattgtcacactgtcttccacaatggttgaactagtttacagtcccaccaacagtgtaaaagtgttcctatttctccacatcctctctagcacctgctgtttcctgactttttaatgatcgccattctagctggtgtgagatgctatctcattgtggttttgattttcatttctctgatgaccagtgatgatgagcattttttcatgtgtctgttggctgcacaaatgtcttcttttgaaaagtgtctgttcatatcctttgtccacattttgaaggggttgtttgactttttcttgtaaatttgtttaagttctttgtagattctggatagtagccctttgtcagatgggtagattgcaaaaattttctcccattctgtaggtctcctgttcactctgatggtagtttcttttgctgtgcagaagctctttagtttaattagatccgatttatcaattttggcttttgctgccattgcttttggtgttttagtcatgaagtccttgcccatgcctatgtcctggactcattttttttttttctcaaggaacaaaaaagaacagtcaaaagcaccttgtcattgtttaaagctaatttgttttaagctatggtgtctcttattcaagagtgagaagtttcaagaagcaatttagataatattttttcttagtcttaattttgatctaaagttttctgatcaacagtacccaaataatattcaatgctgggtagtgacccaaagatttctcacagaaagcctggacagttagcaccttggataacccgaggctgttgttctgttccacatttcctccttgaatttccacattgaggagcacaacagaaatttattttctcacagttctggaggctggaaatctgagatcaaagtgtctgtaggttgagggccatagaggaaggatctgtccctggcttctctcgttgacttgtaaatgcccttttccctgtgtgtcctcatatcgtctttcttctgtatatttctgtgttcaaatttccccttcttgtaagaatatgagttgtattggattaggtcccacctaatggcctcattttggcttacatacttctttaaagaccctgtctccaatatggttacattctcaggtactagggattaagacttcaacatatgaattttgggggtctcacaattcagcccataacaacctgtcttcatcagagtctgtttgccctcaggagccaattctaaatacagtgataaaataaggttcatgacctctttagcaggagggagtggcctaagttagtcagtctgggttgagactccaagacccacatatccacagagatgggatcttctccaagcccttttgaattttctaaatcttgacatctgttccttctcatcggtttctgaacgcatgttccagcttccatatattgtagtctatctgggtggtgactaggtagtttgcttagctgttaaaaaacctctctctccttgggtagatgctttcatctagggttgaacatcagaatcattatagaggtgcttcagaaaaaaagacaaagaaaagatgtacttttattcaaccaagtaaacaaacaaacaactttacaaatgagattctgacacaaattctaattaaagaccaatacctcccctactaccaaatgttgcctgagatcttacaccaaaaagagtgactagcattgtcacttatgtgttaatgagcagcaccaccttcaagaagttgctactggagtcaccacttagatggcaattaaatattaacaacaattaaagttgagactagcttcaccacctccctatgcaattaaataataatgactgttaactacatgccaatcataactctacaaggtagatattattattattttatattatatttttgagacagagtctcactctgtcaccaggctggagtgcagtggtgcaatctcggctcactgcaacctctgcctcccgggttcaagcaattctcttgcttcagcctcctgagtagctgggagtataggcccgtgccgccacacctggctaaatttttattttcagtagagatggggtttcaccatgttggccaggctggtcttgaaaccctgacctcaggtgatccaccagccttggcctcccaaagtgctaggattacaggcgtgagccaccatgcctggccggtagatattatttttaatccctgtttttcagataagaaaaataagtcttaggatgtctgtcttagtctgttcaggctgctgtaacaaaataccataagtggggtaatttataaataaaagaaatatattgctcacagttctgtagtctaggaaattcaagatcaagtcatcagcagattcagtgtctggtgaggaattttgctctgcatcatagatggcaccttcttgctgtgtcctcacgtggcagaaggggcaaacaagttttctcagggttcttctctaagggcactaatccaattcatgaagggtttgccctcatgatccaatcacctcctaaaagtcccacctcttagtactatggtgctgaggattagtgttcaacatgtgaatttttggaggaaggaaatattcagaccatagcaatgtctaagtagattatttaagtcacataactagtaaatagttcacatagtgtttgaatttggatgtgcctaaaatttaagcacaaccttcaccaccttgctatactgctagctgttttcctctagcttgtgtctatagccaagtggttagtcctaacctagctaggctaatttctgacatccagccccaccttgccagaccatttggaatcagcatgtcttgaggaaaacgcctccatgatatgacacagctactgactcctgtaaaaagtctagccctcagcttctgctgttcttttgtgttcttgtgtctggcttgctacattttgtcctactgcctatgctttgcattttaaagactgtcttctaaaacacctacaaaattttcaggaggactaaaattttcatttccaaaatactcaatgagtattttatattataatttaaaatgctttcaatagtcagctcttaggaaaatctggctcttagtgcagaaatggaggatgtagcagacatctgttcaattacagtattgataatagaaaagcttttaaaaatctacacctcataatatgttaatgcagggaaatacttcttagcagtttttatagaatcttgtcttttgcacaataaaaggcaattctccatttcaatgcagatattgagtaaatgaaaattgcctttttaaatttgagaggacagaagaataaagatatttggcttgagataattgcttacactgttggtgaaagctaaagttgtttcttataatgcaataatgactgcattttaaataacacagatgagtttcactctatgcatagataaatagttgtatggaaatcaaattttcataaatgaaattacactttaaaaacacaatactcataagttacttataatttttgtagcaaaatttttttgtaaaaataattgctcagtattcactatataacttcagctatttaattatggtaagaaatttttttaaaaggaggcagagcatgatggctgaatagaagcctccactgatagtcttccctgtaagaacaccaaattgaataaccatccacacaaaaaagcttcttcatgagaaccaagagtcaagtgagcaatcacagcacctggttttaacttcatatcactggaagaggcactgaagaggatggcaaagatagtcttgacttgctgatgccatgtcttctccatcctctggcagagaggcatctgtgcacttgaagtggcgctgagagagcatctgtgcacttgaagggagagagagtgtagtgattctgggacatttaattggaactcagtgctgacctatcacagtggaaagcaaccctgggcagaactcagtcagtgctgatggagggagcatttagaccaaccctagccagagggtaatcacccttcccaatggtcagaacctgagttctggcttctggcaagccttgccactgtgggctaaagtgctctggggttctaaataaacttgaaagtcagcctagaccacaaggactgcaattcctgggcaagtcatagtgctgtgctggactcggagccagtggacttgggaaagcatgtgaaatgccgggtcagcctagggactccttgtaccacccttaccccaaccctagacagcacagctcacacctctaggagagactccttccttccacttgaaaagaggaaaagagtaaagaggactttgacttgcaacgtatataccagctcagccacagtaggatagggtaccaggcagagtcttgaggcttctattataggctctagctcctggatgacacttctagacacaccccgagccagagggaaggatctagtcctggcaggattcatcatctgctgactaaagagttcttgggccctgagtagtcagcagtggtaggcaggcagtacttgcatgcgccttgggtgaaactcagagatgtattggcttcaggtgtgacgcagcacattcccagctgtggtggctatggggagagactcctgcttgagaaaaggagaaggaagagtaaaggggactttgttttgcagcttaagtaccagctcagccacagtggggtagagcaccaaggaggctcttggggtctccaatttcaggccttggttcttagatggcatttctggacttcacctggatcagagggaagctcacagccctgaggagagagtcccaggcctggcagcacaagctgattgaagagcctttgggccttgagtgactattggtgatagccaggcagtactgactgctggcctggggtagtggtggccattgagagactcctctgcttgtggaagggggaaagaagagagggaaggacttggtcttgcggcttgagtgccagcttagccacagtagaagagggcaccaggtagatttctaagatttctgactcgaggctttggatcctggatggcatctctggaccctctcagggccagtgggaccttgctcccctgaagggaaggacacagcctggctagttttggcaactgctgattgtaaagccctaaggtcttgagtgaatataggtggtagtcaggcagtaggtactgtaagccttgtgcaagacccagtaccaggctggcttcaggtctgacacagtgctgttccagttgtggtggccacaggggcttgtgtcaactctcccctagctctgggaagctcaggacagagtgagagagactatttgattgagagaaagtaagagaagacaacaagagtctttacttggtaatcagaattcttctggatcttgttgaagataaggtggtatctctgcaagagccaccgtgttacttgagtaaggatgccccctaatgcaaatatggctgcagtgaccaaaaccttagattataacacctaagtctcttggaatatccagaaagccttcccaagaaggatgggtacaaacaagcgcagactgtgaagattacaataaataccaaagtctccaatgcccagacatcaatgaacattcacaagcattaagaccatccaggaaaatatgacctcaccaaaatcaaccaaataaggcagcaatgaccaataatggcagagatatatgacctttcagacagaattcaaaaatagttgttttaagaaaacgcaacaaaattcaaaataacacagagaaggaattcagaatcctatcagatacatttagcaaagagattaaaataattaaaaagaatcaagtagaaattcgcaattgaaggccggacacagtggctcacacctgtaatcccagcactttcggaggctgaggtgggtggatcacttgtggtcaggagatcgagactagcttggccaacatggttaaaccccaccactaccaaaaatacaaaaattagctgcgtgtggtggtgcatgtctgtaatcccagctacttgggaggctgaggcatgagaattgcttgaacctgggaggcagaggttgcagtgaaccaagatcacaccaatgaactccaacctgggggacagagtgagactttgtctcaaaaacaaaacaaaacaaaaaaaagcaatttgcaattgacatgctgaagaatccatcagagtctctcagcagattttttttttttttgttaaatttttaatttttgtgagcatttagtaggtgcatatatttatgggacacatgagatattttgacggggcactcagtgtgtaataatcacagggtaaaggggcatccatcatttccggcatttatcctttgtgtcacaaacaattttatttatttatttatttatttatttatttatttatttatttaagatggagtcttgctctgtcgcccaggctggagtgcaatggtgcgatctccactcgctgcaagttctgcctcctgggttcatgccattctcctgcctcagcctcccaagtaactgggagtgcaggcacctgcaacaatgaccggctaatttttgtggtttttttttttttttttttttttagtagagacggggtttcaccgtgttagccaggatggtctcgatctcctgatcttctcgtgatccacctgcctcggcctcccaaagtgctgggattacaggtgtgagccaccacattcggacttctttagttatttttaaatatacaatacattactatgggtgtagtcaccctgttgtgctatcaaaattgtaaatcttagtatcaaatactatatcttattcattctatctgattatatttttgtatgccttaagcatgctcacttcccgccactccccactatccttcccagtctctgttaaccatgattctacactctatcttcatgagttgaattgtattcatttttaactcccacaaataactgagaacatttatcagcagaattgattaagcagaagaaagaattagtgagcttaaagacaggctacttgaaaatacacagtcagaggagacaaaaaaaaaaaagaataaaaaagatgaagcatttctacaatagctagacaatatcttcaaaagggcaaatctaagagttatttctcttaaataaaaggtaaagagagatagagtagaaagtttactcaaagggttaatatcagagaatgtcccaaacctagagaatgatataaatattcaagtacgggaaggttatacaactcgaagtagattgaacccaaataagactacctcaagatatttaatgatcatacccttgaaagtcaaggataaagaaaggatcctaaaagcggcaagagaaaagaaacaggctgggcatggtggctcacacctgtaatcctagcattttgggaggccaaggtgggtggatcacttgaggtcagaagtttgagaccagcgtggccaacatggtgaaaccctatctctactaaaaatacaaaaattagctgggcgtggtggcacattgcctgtaatcccagctacttgggaggctgaggcaggaaaattgcttgaacccaggaggcagaggttgcagtgagccaagagcatgccactgcactccagtctgggcaacagagtgagactccatctcaaaaaaaaaaaaagaaagaaaagaaagaaaagaaacaaataacatacaatgaagtaccaatacatctgatagcagacttttcaggggaaaccttgcaggccaggagacagtcgaatgacatatttaaagtgatgaaggaaagaaaacttgtacgctggaataatatatccagtgaaaagatccttcaaacatgaagcagaaataaagactttcccagacaaacaaaatatgagagactttatcaccaccagaactgtcttacaaaaaatgctaaaggagttttttaatctgaaagggagattaatgagccataataaatcatctgaaggtacaaaactcactggtaagtacatagaaaaacacagaatagtataacatattgtgcatagactactcacatcttaagtggaaaaatatgagtgtgcatatgagtacataaactaatcatatcttaagtagaaagaccaaaagatgaaccaataaaaaataataactacaacaactcttcaagacatagacagtacaataagatataaataaaaacaacaaaaaattaaaaagtggagggacaaagttaaagtgtagagtttttatgagttttctctttgcttgtttgttagtttgtttatacagtcagtgttattaaaataaagggctataagacattatttgcaagtctcatgataccctcagatgaaaaatatatagcaaatcacaaaatataaaagcaagaaattaaaacataccaccagagaaaatcaccttcactagtatgaagataggaaggaagaaagaaggaagagaagaccactaaacaaccagaaaacaaagaacaaaatggcaggcataagtccttacttatcaataataacattgaatgaaaatcaactaacccctccagtcaaaagagttagagtggctgaatggatgaaaaaataagacttaacaatctgttgcttacaagaggaatacttcacctataaagatgcagataaacttaaagattttctgtgcaaatgtaaaccaaaaaataaggaggaatagctatgcttatattagacaaaatagattttaagacaaaaactataaaaagagatgaagaaagtcattatatatgataaaggggtcagttcagcaagaggatataacaatttgaaatatatctacactcaacactagagcactcagatatataaagcaaatttcattagtgctaaaggaagagctagatcccaatacaacaatagctggagatttcaacactcaatattcagcactggacaaatctttcaaacaaaaaagtcaacaaagaaacattgcacctaatctgaattatagaccaaatggacctaatcgatatttacagaatattttcttccaacaaatgcagagtacacattcttctcagcatatcgatcattctcaagaatacaccgtatgctggatcacaaaacaagtcttaaaacttcaaaaattgaaattatatgaagtgtcttctctgaccacaatggaataaaactggaaatcaacaacaagaggaatttttggaaactatacaaacacatggaaattaaacaataagctcctgaatgacgagtggatcaatgaaaagattaagacagaaatttaaaaatgtattgaaacaaatgataaagaaaacacaaaatatcacaatctatgggatacagtgaaagcagtatgatgtggaaggtttatagctataagtgcctatattaaaaaagtagaaacactttaaataagcaatctaacaatgcatcttaaagaactagaaaagcgaaagcaaatcaaaaccaaagttaatagaagaaaaaaataaagatcagagtagaaataaatgaaactgaaatgaagaaaaaaatacaaaagatcaacaaaacagaaaatggttttttgaaaagataaaattgaaaaacctttaaccagacaaagaaaaaaaaagagaagaccaaaataaataaaatcagagatgatgaaagagacattacaaccaacatcacagaaattcaaaggattattagaggttactatgagcaagcatatgccaataaattggaaaacctagaagaaatagatgaattcccagatattacaacttattacaattgatctgtgaagatattcaaaacctgagcagaccaatatgtaatgagattgaatctataatgaaaaaatttgtcagcaaagaccagaatccagtggctttattattgaattttatccaacatttaaagaactaatacccatgctactcaaactattccaaaaaatagaggtggaggtattacttccaaactcattctatgaggctggtattccctgataccaaaaccaaacaaagacacatcaaaaaaagaaaactacaggccagtatccctaatgaacaatgatacaaaaatcaaacactagcaaacaaaattcaacaacacattaaaaagaccattcatcatgaccaattggtatatattccaggaatgcaggggtgtttctacatacataaattaatcaatgtaatataccatatcaacagaatgaaagacaaaaaccatatgatcatttcaactgatgctgataaagcattagataaaattcagcatcctttcatgaaaaaatcctaaaagaactgggtatagaaagaacatacctccactcaatagtagtcatatatgacagacccacagctagtatcatactgaatggggaaaatctgaaagtctttcctctaagatctggaacatgacaagaatgcccactttcatcactgttattcaacatagttctggaagtcctagctagagcaatcaaaaaagagaaagaaataaagggcatccaaattggaaaagaagaagtcaaattatccttgtttgcagatgatattttcttatatttggaaaaatctaaagacaccaccaaataactattagaactgatagacacattcagtaaagttgcaggatacaaaatcaacatacaaacatcagtaggatttccatatgccaacagcgaacgatttgaaaagaaattgagacagtaatcctatttaaaatagctgcaaataaaattaaatacttaggaactaagttaaccaaaaaagtgaaagatctctgcaatgaaaatataaaacgctgatgaaagaagttgaagaggcacaaaatattggaaagatattccatgttcatggattggaagaatcaatattgctaaaaggtacatactacccaaagcaatctatatattcaatgcaatccctacaaaatacatatgacactcttcacagaaatagaaaaaataatctaaagtttatatggaaccacaaaagacccagaatagccacagttatcctgaacaaaaagaacaaaactagaggaatcacattacttgacttcaaattactacaggtatcgtaacaaaaatggcatgatactggcataaaaacagacatttagaccaatggaacagaacagatattccaggaacaaatctacgcatttacagtgaatttgttttcaacgaaggtgccaagaacctacactggggaaaggacagtctctttaaaaaatggtgctgggaaaactgaatatccatatgcagaagaataaaactagactcctatgtcttgccatacagaaaaattaaatcaaaatggattaaagagttaaatctaagtcctctaattataaaactactgcgagaaaacactgaggaaactctccaggactttggatctggcaaggatttcttgagtaataccacacaagcccaggcaaccaaagcaaaaatggacaaatgggatcacatcaagttaaaaatcttctgcacagcaaaggaaacactcatcaaagtgaaaagacaatgcacagaatgggagaaaatatttgcaagctatttatctgacaagggattaataaccagtatatataaggagctcaaacaactctataggaaaaaatataataaatcaatcaaaaaatgggcaaaagatcagaatagacatttctcaaaagaggacatacaaaatggcaaacaagcatatgaaaaggtactcaacatcactgattatcaaagaaatgcaaatcaaaatttcatgagatatcagcccagttaaaatgttttttatctaaaacacaataacaaatcctggtgaggatgtggagaaaggggatctttgtacactgtttgtgggaatgtaaattagtacagtcactatgaagaacagcttggagtttccttaaaaaactaaaaatagagctaccacaagatctagcaatcacactgttaggtatatgtccagaagaaaggaaagagatctctgcattcctatgttgttgttgtttttttaaatttatttccaactttcattttagattcagtgggtacaggtgcacatttagtacaggggtatattttgtgttgtaggggtttggcgtccagatttttttgtcactcaggtaataactatagaagtcaataggcaatttttcaatcctcagcctcctcccaccctccctgctcaagtaggccctggtgtctattgttcccttcttttgtgttcatgtgtactcattgtttagcttccacttagaagtgagaatatgctatatttagttttccattcctgggttaattgactaaggataatggttttcggctctgtcagtgttgctgcaaaagacatgatttcattcctttttatggccaggtggtattccttaaggtataggtaccacattttctttatccaatccactgttgatgggcatttaggttgattccatgtctttgctattgcaaatagtgctaccatgaacatacatgtgcatttatccttatgatagaaaaatttatatttctctgggtatgtacccagtaatgggactgctgagttgaatagtagttctgttttaagttatttgagaaatctccaaaatgcttttcacagtggctaaactaatttacattcccacccccagtgtataagcattcccttttcatttcaaccttgccagcatctgttattttttgactttttaggaatagccattctgagtggtgtgagatagtatctcattgttgttttgaattgtatttgtctaatgattaatgatgccaagcattttttcacatgtttgttggctgagtgtatgacttcttttgagaagtgtctgtttgtgtcttttgcccatttttaaatagggttgtttgactacagtcaataataatttgttgtacttttaaaaatacgtaagagtataagaataattggattctttgcaacacaaagaaagggtaagtgcttgaggtggtggatacaccattttccctgatgggattattatgcattgtgtgcctgtatcaaaatatctcatgtacctcatcaatattcacatctactatataccccccaaaatttaaaaaagaaacacatacaatatacatataaagtacacatatatatcttatataactttgggagaaaaataatacttaaaaataatgtttctaaaaattttaaatttctaaaattgtaaatataaatgtttgatatttgaaaaataaaggtattgaattacatgaactaataatatatcattatgactcgaagtgggcaaaggctagcaaccataaaaggagaaaatagaaaacagcttgttaactttagttaaggacaattttatacttttattcaaacaatcctatgtagggttcaatgtctttcttaggaagttttggttgaacagttttgtcctctatactgtgctatcatattccataaagtatttctgttgaaagaattttcaactctttactgagtcaaaagttgaatgtcatactctctttctttaaaattgatccaaaccagttctctgtcatgaattaagattaaaactttcaacgctctatcctatcttttggttaaataaatgaatgggtgatgaataaatatagggtggttgccatggcaaatctttaaaaaaattatctaattatcaaagtcaaatcagatttttaaaagtaaaaaggtcttttacatctgtaagacacaaagtacatgtatattgttattgttcttaactagctagagattagatattacattatctcaaatttattgtaataaataaatggagagttgcattcattttaatttacaaacattttagtgggttcaatggtggtcccccccaaaagatgtgtccatatcataacaccaaggatctatgaatgtgaacttatttgaaaaaagggtctttacagaaataattgagcctctaactgagaacatcctggattttctgggtggctcctcagtccaatgacgagttccttatagcagaagtagagacccagagatccagaagagaaagctatgtgatgacagaggcagagcttggagtcatgcagccacaagccaaagaccacttggagccacctgaaactgcaagaggcaaggaagagctcttttctagagggagtgcagccctgggcgtattgccctagtagcaccttgattttggacttctggtctctaaaattgtgacagaataaatttctgttgctttcaggtactaagtttttggtaataagttgcagcagccttcggaaactaatacatatatcaaataggcggaggaccagtatgccaaagaaaggaaatgatttgttggctcttcatgctgagtagggaggaagaaaacaagctatccagtatgttcatctccactgctctcctctaaaaggagataagtctctaccagtctctactatcaagatataaaatctttaattgttaattttttattgagatataacatctatcatataaagtaccaaaatctcaggtgatactttttgcatatatatttatgtattaatatgttcaagtttctacacacacatacaattgtgtaacagtaaccaccactcagatggacacagaacatttccagcataaaagaaagttccctagagtccatatcctgtcaaaacctacctatccacaatagcctctgaaaacaaatacttcgattttaatacaaaaattagccaggtgtaatgatgcatgcccctagtcccagctacttgggagactgaggtgggaggattgcttgagcccaggaggtagaggctacagtgagctgtgatcacatcactgcactccagcctaggtgacacagtatttgtgacagggtcacctgtctcaaaaacaaaacaaaacaaaacaaaaactcattctattattagcagaaatgggatcatacagtttgtatttctttgtgtcattatttgtccgtaatgtgttatttgtctgtatatgctcattattatgtctgtaaaaatcatccatgttaattgtattaatcaataggtctttttctgtttaattagggaggtgaatattccacaaaatatttactcttctcttaacaaacagttgggttgtttctagttttaagcaattgtaagaaaattgctaagaatattctggtcttatatcttagtggacatatgtgtttatttttcttgggtatatatgtaagagtgaaattatttggccatagggtaggcatatatttagtttttatagtactattaagaactgttccaaaattattgtatcaattcacacttccatcaacatggtatgagagttccagttgctccacattcttgctgacacttacaattgtttgccatttaaattttagccactggtgggtgtttagtggtatcttattttgtgttttaatttgcacttccttattgaataattatgttgcgcatcttcccttatgcttgggctattttaataacctcttttatcaaattcctgtttgagccttttgcccatgaaacaattttttttgtcctttatattattgaaaattcctttctgctttagtgaatcaaggacataaatagtcagtctttcatgggtagaatttaatttttctgtgcattggtctattcccagagagctttaaatcttgcttaattgtgctcacctttttatacatcatggattttgactctggttctttcgtttttccatttcattttagtcaccaaaatgcttaaaactagagatcaactttcttagctgcaaaagcttctagcctttcaagaagttcatactttatgaaattgcacattaagcatttatttttcagaccatttttgaacattactcctaaattaataaagtattctgatactgctttagtattgattacagtaaaaagggtttgaaatatagctgttctttatgcataaaatacccagctaggaccagtactgccagagaaaaacatcgtattgaatggccatttccctacctaaaagatgtctcaatctgaatttatttggctacactaaagaatgcagtatatttagttttccatttgcataatgtgtttgtgctatagataatattttaaattgaaaagtttgttttaaattatttttacaatgaagactgttttcagctctttttatattgtgcatagtttttttatgtaatctactagcatgtgttttttgtagactgtttaatgactggatatcttcctccaatttttgaagtacaaaaccagtgtattttacttgtacactgttttaaaatctattaaaattgtcatttgacttttttctgttaaaatatactttctgaatacaaagctattattacattgtcggatatcagaatgcataatcctttggatgagtatataagttatacatttctgcagattgatcaattaaatattaatttatagtaatataataactgtaatattattatagtgatggtattgttaataatagtaattgatgagagaataaaagatttatatcttttattgttaaagttggacaccaaaaattaatgttagacagctgccctaccctgctccaactgctcagaatttccattcttcatccagtgggattttgtaaactccatagagactcttccatatttttttctacttttaagttgttgtttatttatttccttaacacatcatatatgttattagagaataaagcaatcgtaagtaattaagagaataaactgtttcttggttgttagaaatatcctggggccaagagactcatctcctatttaaaataatgtattgtgaacattcagtattgtgtattatagaaaaataaattcctgaggaataaataatttgcttttaatattaaaaagctttatcttcctaactaaaaaggttgatactaaaaagccagaacccagatttttccccttctagcttttttttagtgtttttttgttgttttaatggggagaaagagagaaattgcctaatactgattaaagcatatggccttatcttaggagcagtcccaaggttttgacaaaaaatataaaacattaaaaataggactttatgtgctacttttttgggcttggctggaggacaggacaaatacacagtggttttatgagcccccctggtgtataatatttatcttatttgctcttcatttatatttagtgcatgttgtaaaactgtgtaaggctatgaggtaactttagaagttataatgggcaacagctcttaatggagacttttcaaaaaatttttgtttacagattcactttgaagagtattaaagacacattcagctgaataaagcagactctatgtatcataggcttaattcatacatgtaataaaatctttccatgtgcttgcagaaataacacaaagatcaataaccggaaggaagccagagggatgaaaatgcatggtagatgaagattgttttgcacaagacaagagaaagaatatttaaagcttgctgacagattaatatggtctgctttacattttgtctgctatattacaaaatagttgcatctattctcagaattttaatcaaagccactgaaggagaaaagtgggcatttagaaaaatgaacctactgtttggctaaggatcttcagcaaagtagtacattctcaatagcatgttattgttcgttatttcacaaagacctcatcttcaagttttgttgggcaactagatgtgtagcctgtgaagttctgataaataatgatggtacatgatgataccaatttctttaattcttgcctttaaaagatgttgcaacataaaacaatacaataactggttcttgatatatttggcgtttaaaaaatacacacttagtggaaatcactctagacatttaaaagtaacgttgaccttatgaatatttgcatatgaaaagtgaaaaggatcatcttaagtgcagtagtgccccactgatagcatgagttaggacagttggtctggatggccttgtgagtatctcctgccttcatcacccctccacctgttcttcccaaagctttgcaagagatatcaagagacttgagaaaatatttgcaagacaaggcagaatctttggtcaaggacatggagattgggcaggctaagtttagcaactcaactttagtgatcaatggcaaataacaccaggcctctccatgttaagaagtgattgtgaatttgagatgccagagagctcatgcttggttaaaggagcaactattgctcaattccaatgtatgattttcaatcaatttccaagaatttccttgtgtttaggttctaaacagtctactgttaaaaccatgggtacacattggatgttatggtaatacaaaggaaatggttagacagtatacccatttatggaagttcctgtggtccacctacaaaacacaagttgacaatcacagtggctgctgtcgtcaatcctgggctgttgtgcgctgcagtattttcaccctggccattcaacacagttcatggacatcatgtctttccactgatacttttttaaagatagtttttatataaccaaatccttattccgtttacaatgaggtgctataaatgaattacctgaaattatatgtttgtctgttatctttcactatttctacttcacattaatttttagctataaaattgataaaccgatgcttagtaatatctctttccttcttttactctttggttttcaaattttatttcaatgccagagaatttcatttactaggaacaatgtattacaacacatttaaaaataaactacttaaatttggatgccaataataacaatacaactcaatggaacttgagttgttaaactcagccttcctgcagtttgataattgtatttcagagctacctcaccatgaattccttgcaaattttttccctgtagacaaaattaaaactgaattcaggaagttccagggggctttgtacttgttgttaataatgttattgctttattgatcaaccgtgtgggtagaataggcataatttttagcacacttaacctattgtcaaagtcaagatcctaaagccttccagcaacatcataaacttggttttaaaatatcccttttgaaaacattcattgaaagagcacctgctgagagtcaggtaacaggaagagttataaagatgtataatatgcattctccaccttcacagtctagtgaaggtgatggtggatacaatttaaatgcagtcagaaaataaaggtcatgtaatatagcatatttcatacattaataaatgattttatactttgaacaaactcatttcaatatttattttagtttctaactatgtaacaatttcaaacaactgagtattttctcttaacactgaaatttctaatgtcttatgtactgtcaatgtgaaattcataatactgactccacttatcccccgtgctggaatgcttatatattgaatagtgtttggatttgacaattacattggtaattgtcttgattccaaggaaagcatagaaacatttttaaaaatgtaagataaaaaaatttaggagataaatttaatcatttcttatgtttttacagtcattgtctttcactggctctgaagtgaatagcaacaaacatcctttactcctggtcttgatactagttctgactaggatggggaggaaattgggagttttttaaatagtttctctaggaagcagaatgtaattataacaggtactgtcctggcaatctttgtacttgagaaacctgtgaatacctgtgttgaagtagcccagatcatggggttggttttgtgccacccccatgtggctttgtgccactctgtctttggcactccagtgtcctgtagtgccagaaacccaatcctgaattcca

SEQ ID NO: 78 - DNA, 109799 bp, Homo sapiens
atcctaagaggcagggatcttaaggacaaggaagagaagagagagagggagggatctttgatctctttctctggtaatcttaatgcataattttactaatacatgttctcaattcattcatattattaagctcttcctgcagttgatatctgagcagagtaagatttgtatttccatttttacttttttgaaagagaatatatggacagattattagtacaatttgggcactgtggttttaagaatatctgagtaaaataacaatatgaaataataaacagaagctctaacgtcaggtaacaaatagacagcaagaaaggttttgcaccatcctcttacggcctagagagttgacaagttgcttgtagttttaaaaaaataataaagtatacccttctggtatatcatcaagagcttaagaatcttggctttcatatttaaaatgcttttggggagacatatattaaaattttagccaagatgatagacatgtctcaattatatatgtgtgtgtatgtttttaaagctaaaaacattacttttagatccctagaatgaaaatttttttctcatctatgcaattcccatatggtttttttttaaatcatattttattcattttctccctttagcaattttcattttatttctcataatttgaacagagacagttctcatacatgatcagatgctttttttttcttcttaccatcatttatgcatgacataggtaatgtgactaatttctccagttgattcaagaaactcattactttgcctcaaattatatgtaaaatatttgttttacttaggttacagttatcagaaaggtagtttttttcttctattaaaatataacattgtgaaagaaaataaaatttatgctattctttgctttgtttttataaatgaatttttcatagaatttacagtatattcaaaggaagaaagataaaattattggtcatcatttgtaccttagaagtacaagaatttaagtaaaagaaatgttcatttttgttttaaaatttgttttccatgtgaagtttttattgagccaactttcatacatatcttgctagcctaaagtctaaatatttgtgttggcatcagaaaaacaaatgaggcagaattgctatgtgtggttgatcttcagataaattgactgatcacagttatttttgtatcagtctatgttattaggaaaaattgtttagttgttttctcccctgattaatggtgatattcaagtatgatacaaaaagaattgtaccaccaaatatttttgtgaggtctgctgttttccatattcattttatgctactgcctttaagaaagaactagtgtatccttgaaatagcacaaaaatgttttaaaattcataattgcaaaacaaatctgtgactaacttaatgtcttcagatctaaagggtgtaaaaatattgatacttcaatatttcacttgctgccaggaaaaacaaaattctcaatcttttgtaaatgggaggaggacttttgcatacatttttactctttaaataacgacaacgacacttatactgtcataataacaattatgtatttctttgtggttttaattttttttgtaattttacataaaacagttattttctatttttacgcagataaatatttgtgcataaaatgtaaaaatagtaaaatgagaaaaataaaactattatacagtatgtttctgtgttgcttaaaagttttttttcctgaaaacaaaatcttaaatccccaggatattttgttggatagtaatctgacagtccacttatgatacgttgtacataggattccgatgcatttttaaacttaaaagctgtcaatttgggaagaacatatttcactgaactaaaattagtaggttcatctctttgaggaaattaatgaaattccatctacaaagccaagttgttttagaatagtaacagatgaagctgtcagaaggcaagctgatgattgctaaattgtaaacctttcataaagcctttttttttaacaaacaaaaaatcacctgttcatgttggctatcagcaggttgcttcagccagaatcagaatatagaagaatggaaagggttaggaaaaagtgattcatgcctgccttcatggtgaagcaatgatgaaagtttgattgacatgcttaaataggaagttatggttagaaataaatggctttaaaaatacacagtgtgattgtatctagttcgaagcaatcaaaaaccatcagccaggacgctagtgaggtatgtttgttctcccaggacttcagttttttgtgtgtacagcttcagagtttaatttacaagccaagtatgtgtttaaaatgctttttactgataaactgacaactttagaacactgcttttaaaaatttccgtagtgaaggaccactttcttatttccaatttgtcacagacaaacatctgtaaaataaaaactgaattagtacagggagggggaaatgggaagttactgtttaatgggcatagagtttcagttttgcaagatgaaaaacaagatggttacacaactataaacatgcttaacaataccaaaccgtattaaagatggttaagatggtaaatttcatattatgtatattttaccacagttgagttttttttttaaagaatgaattactataagaattttaaaaattcagtatttaccaaattaacaatacaatgggggaggaacacattcaactcaatagatgcagaaaaatgtacaacttgacatccattcatgattaaaactctcagcaaactagagaacttctttaacctgataaaaaggtatctgtggaaaaacctacaactaacatcacgtttgttgcccctcaccactccgcccccctccccacaagatttgggaaacgcaaagaggtacctgcttttataatttttattcagaattgtatcctagtctgtgaaataaggtaagaaaaataaaaagcatacatactgcaaaaataaaactgcagaaggcatcagacatgttaaaacgcctcaagaatcaaaagttatgagaatatagcaaggtaaggtacaaggtcaatatgcgaagttcaattttatttctgcgtgctagaaactaataaatggaaattaatatttaaaaaccaccatttacaataatattaacgtgaaatagggacaaatagagcaaaatttgtgcaagacctatcaatgaaaactatagaacttgcaaagaaatgaaagaatgtctaagtaggtggagatataacaccataattctggattggaagactcaattttgggttttcttgtttttttttgagacagtctcactcactgtgtcacccaagctggagtacagtagtgcgatctcagcccactacaacctccgcctcctgggttcaagcgattctcatgcttcagcctcccaaatagctgggattacaggcatgtcccatgacacctggctgattttttgtatttttagtagagttgggggcttcgctatgttggccaggctggtctcgaactcctgacctcaagtgatctgcctggctcggcctcctgaagtgctgggattacaggcgtgagcaccgtgcctggcctaagacccaattgtgtaaatgtaaatcttgtaaatgttagttattcctaaattgacctataaattgaattacaacaaaaattctgccagtctttttttgtagacaagctagttataaaatttatatgtaaatacaaatgacacagaatagccaaaatattttggaaaaagagaacttgcactgtgctatataaagctttgctatataaagctacagcaatcaagaggtggtatttaggtaaggataaatgtatataggtcaatgaacagaatagaatccagaaatggacccacatatatggctcattgatttttggtgccaaaatcaaaggtgccaaggtaattcaatagggaaagggtagttatttcaacaaatgttagaacaactgcatatattcatggagaaaaacccttgcctcataccacacataaaaacaatggattatagacctaaatataaaatctaaaacttattaaggaattttcataaccttggggtagataaagatttcctagatattaaagaagcaaaactaggctggatgtggtggctcatacctgtaaatacagtgctttggaaagctgaggcaggaagattacttgaggccatgagttttgagaccagcctgggcaacatagcaagaccctatctctacaaaaatataaaagttaaaataaaattagctgggcatggttgtgtacggctgtagttccagctactcagaaggctgaggagggaggattgcttgagcccaggttaaaattcgaggttcaagtgcaggttgagtttgaggttacagtgaggtatgattctgccgctacaacagcactccagtctgggggtgacagagtgagacgctgtatctaataaaaaaaaaaaaagacagtaaattggacttcatcaaaaatttttaaaacacctgttatttgaaagatactattaaaataaaaggcaaggctgggtgtagtgacacatgcctgtaatttcattgctttgggaggctgactggggaggactgcttgaacccaggagtttgagaccagcctgggcaacatcgtgagaccccctctctatgaaaaaaaaaaatttaattagccaaccttggtagcatggacctgtagttctggctactcagaagcctgaggcaggaacactgtttgagtccaggagtttgaggttataataagctatgatcataccagtgcactctagcctgggtgagagagcaagaccctgtctcaaaaaaaaaaaaaaaaaaaagaaaagaaaattaaataaaggacaaggtacagattggaagaaaatatttgcaatacacttatcttacctaggttacaaaggtaagataagtgtattgaccacactgatttataatattttgtcattaagcaatgagcatcagttgtaactgaatgattatggcaatattaatatcttacaaaggtaagatatttaatatcaaaatatatgataaattcttttaactcactaagataatcaaataatttatggtcaaaggatttgtacagacacttcataaaaaaagatatacatatggccagtaagcatatgaaaagctatttggcattattagttatcacgaaataccaagtcacaatccagtaccactaaaaacacattacaactgctaaaagttaaaagactcacaataccaactgttctcaatgacatggaccaaatgaagtcacacacattgctagtggaaatgtaaaatggcacactactttggaaaagttaaacacttttgtcacgacacagcaattctaatcctaggcatttattttatgtatttatttttttgagacagagcttcactcttgtcacccaggctagagtgcaatggtgcgatctcggctcactgcaacctccacctcccaggttcaagtgattctcctgcctcagcctcccaagtacctgggattacaggcaccagccatcaagtccgggtaatttttgtatttttagtggagacagagttttgccacgttggccgggctagtctcgaactcccgacctcaggtgatctgcccgcctaggcctcccaaagtgctggcattacaggtatgagccaccgtggctggcccaatcctagacatttatttaagagaaataaaatatgttcactgaaagacttgtacacgaatgtttataacagctttattcataatgtctccaaactgttaacacaaatatccatcagcaggtgactgaataaacaaattatgaatacccatagaacagaagtacgactcagcaataaaagggagtgaacaactgcctcatcaacaactctggaaaaggcaaatctcattgtaaggatagaaagcagatcactggttgcctagggctagggataatggttgatttcctggattaggcataaagaaatttgggaggatgatgagcatagcctatattatgctttgttgacgattacatggatgaacagatttgtcaaaactcatctaaatgtatacttaaaataggtgcatggggttatgtaaatttcacctcaataagcttaaaaactgaattactagagaaatgaaatttaaaagacaaaaatacataaccactttttaaaaattattagattccacaagcataagattgctatatcaaattatcaaaattgttttaatgcttgctcttatctccctgtggactgatgacaaacagttcacggactgaccacactgatctacaacatttcatcaactgatgagcatcagttttaactgaacgattatggcaatgttaatggtatttgaaaatttctctgtaaaccttttttttttttttttttgagactgagagtctcactctgttacccaggctggagcgcagtggcttgatcttggctcactgcaacctccacttcctgagtttaagcgattctcctgcctcagcctccccagtacctgagattataggcctgcatcaccacgcccagctaatttttgtagttttagtagagacagggtttcaccatgttggccaggctggtcttgaactcctgagctcaagtgatctgcctgcctgagcctcccaaagtgctgggattacaggcatgagccaccatgcccggctgtaatgtgagaaaagcattttctcatgtctgctaacaagatagttgatttgggaatcttatttccatgatactagtaacacccagttagcacctatgctatttttataggtaacaccacagtaactagacatgaatgaaatagaacactgaagaaaaagttatttatcatatctatgagcaactctttaattcacttccttagaaaactatgcaaaaaggtttgctctaatactcacagtacgaatagagaaagtaagcttcctatctctaatgttggttttactttgtgaatgagagggcatattgcatattaatacactgataaacatcactgaatagttgaactagaatgttcatttgacttaatggttaaaggaaaaagctatgcattaagaactccatactaggattcttgtctccagctctcaaatcataaaaatagaggatttttgtttgtttttgagacagagtcactctgttgcccaggctgcagtgcagtggcacgatctcggctcactgcaaccttcaccttccaggttcaagcaattctcctgcctcagtcttccatgtagctgggattacaggtgtgagctaccacatctggctaatttttgtattttatagagatgaggtttcaccatgttggccaggctggtctcgaactcctgacctcaagtgatctggccaacttggcctcccaaagtgctggcgagaggtaacagcctgctagcagccctcgcagccctcactcgctctcggagcctcctcggccttggcgcccactctcgccgcgcttgaggagcccttcagcccgccgctgcactgtgggagtccctttctgggctggccaaggccggagccggctccctcagcttgcggggaagcgtggagggagaggcgcgggcgggaacccgggctgcccgcggcgcttgcgggccagcgcgagttccgggtgggcgtgggctccgcgggcccgcactcagagcggcctgccgccccaggcagtgaggggcttagcacctgggccagcagctgctgtgctagatttctcgtgcgggccttagctgcctccccgggggcagggctcgggacctgcagcctgccatgcctgagcctcccccctctctctctgtgggctcctgcgcggcccgagcctccctgacgagcgccgccccctgctccacggcgcccaggcccatcgaccgcacgagggctgaggagtgcttgcgcagggcgtgggactggcaggcagctccacctgcagccggtgcgggatccactgggtgaagccagctgggctcctgagtctggtggggacttggctaatctttatgtctagctaagggattgtaaatacaccaatcagcactctgtatctagctcaaggtttgtaaatgcaccaatcagcactctgtgtctagctcaggatttgtaaatataccaatccacactctgtatctagctaatgtagtagggacttggagaacttttgtgtctagctcagggttcctaaacgcaccaatcagcaccctgtcaaaatggaccaatcagctctctgtaaaacagaccaatcagctctctgtaaaatggaccaattagcaggatgtgggtggggccagataagagaataaaagcaggctgcccgaatgagcagtagcaactcgctgtggtccgcttctgtagtgtgaggaggtgtgttctttccgtctttgcaataagtgttgctgttgctcactctgggtccagctgcgtttatgagctgtaacactcaccgctaaggtccgcagattcactcttgaagccagtgagaccacaaacccaccaggaggaacgaacaactccagctgcgccaccttaagagctgtaacactcactgaaggtttgcagcttcactcctgagccagcgtagaccatgaacacaccggaaggaagaaactcggaacacatccgaacatcagaaggaacaaactccggacacgccgcctttaagaactgtaacaccgccagggtccacggcttcatgcttgaagttggtaagaccaagaacccaccaattccggacacgttttggcgaccacgaagggacttttgcctgtcgctgagcggtgagaccatcgcctatcgccaagcagtgagtaccattggaccccttttgcttgctattctgtcctatttttccttagaattcgggggctaaatactgggcacctgtcagccagttaaaagtgaccggcaagtgatctggccaccttggcctcccaaagtgctgggattacaggcgtgagcaaccgcgccgggcgtaaaagtagaggatattttaaatagaattaagtgtgagaatctgccctgttggcataaaatatattagctaattgattaaacaaagaatacctagaataaaggtataaacaaataaccttccattgtggaggatatgtaaagtggcgtgccaaaggaaagaactagaagaaacagattatggtccttttcccactaaccagatacgaaacttacagctagttgtttcacctttgttcacctccattttctctctcctgtgttggggtcgttgacacatttgcctgcagtgcagggccattggaagggttaaatgaactcagtatgtaattcatcttgcaggctcctaaataagtgtaaaggtctaggaaagaaaagcctccctccaaagaatccagtgttctaggttgaaattggtgctcctctcgcgtaatggtgaaaatcacaaagtagcgtaaaaaacatgttgaatgaatgagtaaggaataagagctaattctgatctcttacgatatgtcaagtcgtttatgtgccttctcacttatttctcacaactccttgaagtagataactgtccgttttataaatggagagattgaggcatagagggattagtcaacttggctgaagtcacttgcataagggccaacccaggcttgaagccctgcgtgggcttttcattaggatcaagtctgtctcaacagaatatagctgttaatacctacagtcaatgaaagggaggtgtgtttaacacgtctaaaaaatgagaattgcaaacattgagtatttttttcatttttcctggcttgtacttgtcttacccaaagtgagaagcttataccaaattttactttaagtagtattcatctctaataagtcaacggagttttattaaacattatcatacagccaacccttagtaaaataatggctctaggcaatcatcaccaacagctgctaaaaccactagctgaaaagttagacgctttgtaaaggatggatttgcctcacaatccctgaatacatatatcaatcttagtatcaccaaaagcgagacaaccagggccgggcgcagtggctctgtaattccagcacttgggaggccgaggcgggcggatcacaaggtcaggagatcgagaccatactggctaacacggtgaaaccctgtctctattttaaaaacacaaaaaattacccgggagtggtggcgggcgcctgtagtcccagctactggggaggctgaggcaggagaatggcgtgaacccgggaggcggagcttgcagtgagccaagacagagctactgccctccagcctgggcgacagagtgagactccatctcaaaaaaaaaaaaaaaaaaaaaaaggccaaccagataatcatatgcctcctaatatgacgcattgggacaactcttgccaaaacataaactgaacctaaatctgataaattcctcagatgtaagtaccagttcataggaaatataggacacagagagactgtcatttacatggatagaatcaacaaaaatataaaagaaaataacgttaaaaaaaattacaagaaaaaaagggaaatgtgtagattaaaagagacttaagagtgtcactcaaccaaatgcattctgtggttttgtttgtatcctgattacaataaactataaaagaaattgaggcaatcaaggaaatttgaacgctgtatttttttaaatattaaggaatggctgttctttttttcggtgtgataatagtgttgtggttataaggaggaaaggaaggaaagagaagagagagaaatggaggaaagggattttaatctttcaaaaatgcatactgaagtacttagagatgaaatagtgtgatgtctagcatttgcttcagaatatttcagtgggtggactatagattaaaacacacacacacaaaggccatgtgctgaaagcagactgggtggtagctacatgtagatacatgagggtttattatactgtgctctctgttcagagtatgcgtgaaattttccataaaatagtgcatttttaaaaaactattataaagaagcttacctaaaagaatagcacagatgcggcaatgtcacctacaaaatcatagcaggtttttaaaactgcatcactaggtaaagaatacatatttgttttcatgaaatgggcactttatgtaacaaatgtgtttctgaaaaagttgtacctaaataaaatattataagcataattgttagcagtattatatatactgtttggccccccccaaaaaagatgcatttataattttttttgcgatcctcccacctcagcctttcgctgggaccacaggagtatgctacaactcttggctaattctttctaaatttttggtagatgcaggttctccctgtgttgcccagcctggtctcacactcctgggctcaagggatcctcccaccttggcctcccaaagtgctagtattaaggcatgagccaatgtgcctagcccatagttcttgaataccaaggaagaaaagaggtttataattaagctctaaattacagaggagtggtattcctgaaaaacgtttagtaagtggaaactgcaactgtaatgcatatatgtagaaacccaagacttgcaatcacttcacaagaaacattaggcacaaattaccacaaggtaacacagcttactgacatggaaatgagattccatcaaacctatttctaaaactccttcatagtttcttattgccgtctggaaaaaaagtgcaatttccttagcgtggtgtgaaagcatggagccagtttttatctttacccagcttccagtttccatgctccttcttcctggaagcattatttatcaaccataattagcccaggtcagatttgtgcattagaaatacggtcacttagcgctgtctcctccactggattagcagccatgacgttcaggacctgatattgtctttgtttatcactgcatcttcaaaccttagttgtggccgggcccagtggctcacatctgtaatcccagcactttgggacaccgaggcaggtggattgaggtcaggagtttgagaccagtctggccaacatggtaaaactctgtctctactaaaaatacaaaagttagcgaggtgtggtggcgcatgcctgtaatcccagctactcgggaggctgaggcaggaggatcgcttgaaccttggaggtggaggttgcagtgagccaagattgtgccactgctctccagtctgagagacagagtgagactccatccgcctcctcctcaaaataaaaatccttaggtgttataatggatacagcactgtagttgtgccattagtcctcaaaattcatggtgttagcatcttatatcacttattttatagacaaagaaaaattattatactagagaactgcatttttttcctacagtttcttagatataattccatggaaacttggatctgctaaaacaatcggcagcatcaatacagcattgggaaatgataaaaggaaatctgttaaaactatcagaaatcttattaatcacatatgtttatccatttgatagataaatcatgtccctttgtcgatttaaaaataatttatattaagatatctttctgacaattattgtgacttttttgagaagcatgctttggtactatagagtatctttagcacagtgattcgtatttggataacaagagtcacaaaaggaaaaatcgcctttactttaatgcttaattatttgccataatatatttgatttgtatatgactttgtagaaactactttgtgctcaagtttgttcctctaaatagaactttatatttcttaattggccagcttgtttcattgatctgtcccaagtctcattatgaaatctcaaaatctcactttgattgatttgaaaaagtggagggaatcagaccatttggttttttttcctttgtttttgacaagatttttggtgcacagtttgagaaatggcagaattaccccccagctaaaatattcggaggctcaaaattcatactaacctttcttgtttcctaagctgaaaaaagctgccacgcagggttcttatggcaggttcttgtcaaattctcacactgaagaaaatcaatgacatatttgagagcatcaagcttcagaagaatttagcaaacaggatgtcagaaacctttcagaaataaaatcattcacctgggtggatttagggctgaaattattccatgatatgtttgataaactttcatgccactgaaaacatttctccctcatatttaggcttctaaaggttttctcgactttcttatgttaaaaattaacccatctcatctctgttgagaaataaataatgccccatatctttgaaaagataaatcaatgttaagattatgttctatgtcctcacttcatctgtgaggatgtcagaatttcttttggctgtttgtcaagtcattggcaatatcagaattatctctcagaagagaaatagttgaacttgtgtcaccctgtgggatctattgggagtgaattagattgtggaaacggcatatgctctatctgaaagtcaatctcagttcactaactagtgtcctagaaatctgaaggaggtaaggatgagaaacaatgtttcctcaaatctctctatattttcactatttcctaaaagttgataactagaagatcaatttagtatctctttggggaggagcatgagtagggactgtggtgtgtgtgggtttgtttgttttttttttttttttggagatggagtttcactcttgttgctcaggctggagtacaatggccagacctcagctcaccacaacctctgcctcccaggttcaagtgattctcatgcctcagcctcccaagtagctgggattacaggcacacaccaccacattggctaatttttatatatttttttttttagtagagatggggtttctccatgttggtcaggctggtcttcaactcctgacctcaggtgatctgcccacctcagcctcccaaagtgctgggattacaggcatgagccaccgcacccgccctgttttttcatttctgttccctctgattgaaatgcttcctctttttatccttccttttccttctttctctctgtcaaaattcccattatcctttattgtccagaattgaccagactgtccttgaacacacttcctttgaagctacactcacctgattttccacctcactgacccctacttttgggttccatactagactcctttttctcttccaaccgcacattaggtgactgtaacgttacaaatcatctatgtgagtcatcaatcttcatatccagctttgatctctcccagaatccattaatatctctatctgcttacaaggatgtatagtaagacattttaatcaaaaaatggcaaaaagaaaactcttttattttttttagaccgagtcttcctctgtcacccaggctggagtgcagtggtgccatctcggctcattgcaacctccacatcctaggttcaagccgttctcatgcctcaacctcctgagtagctgggactataggcacagcaccaccacgatcactaatttttgtatttttagtagagggggtttcaccatgttcaccacgctgatctccaactcttgatctcaggtaatctaccacctcagcttcccaaagggttgggattacaggcatgagccaccgcaccctgccctatcagtaaatattatattataaacacctatcacaaatgcataggtactcagatggatttctggagatgattctttaaatgtgtttaattatgttgattgatttttgaatcacaaactgattttgttttcctgtaatgaacccggcttggctctgatgtattattttggcatgttgctggattcggtgtacaagtattttgttgaaggttggttttttgtctgcaaacataagagatactggtctgtaattttcttttcttgttgtcaggctttcctgtgggtttttgctgtccccataactaagttggaagtgtttcttttgtctcttatttctgaacatttttggataatattgttattttttctttaaatattggatagacttcaccagtgaaaccatctagccctggagttttctttgtgaggagacttttttattagtggattacacttcttaagtagatataggaaaattaagagtttcaatttcatcttaagtcagcttggacaagttgactctttttccaagaaatttgtccacttcatccaacttgtcatatttgttggcataaaattgctattatccattgtctatagaatctgtggtatatcttgctttcattcttgacatcgaaatttgggtttgtctcttttaaaaaaaaaaaaaggtcttgctagggatgaatcaatttcattgatctttttaaggaattaatttttggctttgttaattttctgttatttgttgtcttctctacagatttatgcttttatctttattgctttctttcttgtttgggtttaatgtaatcatatctttctggcttaacgtgaaaacttatgtcactggtttaacacatttacttattttttgagaatccacagaccatttattaagataaatcttatttgagtccatagacaagtcttgataaatttaaaaggattaaaaccacacaaagtatgttctctgactataagggatttaattagaaatcaatagcagaaagatacgtagagaatacccaatgatttggaaattaaacaatacattaaaaagaatttttttactatatacatttaaagctgtgcatttctcctaaacatagcttcagctccatcaaatacattttagaatgtcgtacttttattataattcagtttaaatatatactaagttcctttgtcatttcctattttgcacacttggattatttcaaaatatattatttaatttcaatatctatcacagtggcttttgtcattgtgagaagttacgaagattccaaatttcttatgagtgggtattgtttgctcataaaagtttagcccattaaaaatgatgtggcatatgaaataacataacattttatttccttttttattacttctttgtaaaatccaattttaaacattttattaaaagcaaaaagttatgatatagtattaaaatatttcattttgggctgggtgcagtggctcttgtttgtaatcccagcactttgggacaccgaggcaggtggattgaggtcaggagtttgagaccagcctggccaacatagtgaaaccccatctctactaaaaatacaaaaaattagctgggcatggtggcaggcgcctgtaatcccagctacttgggaggctgaggcaggagaatcgtttgaacctgggaggcggaggatgcaatgagccgagatcacaccattacactccagcctgggcaacaagagagagaagctgtctaaaaataaatttcggtttgaagaatacatacatcagtatctatatatgtaaatcacatgtatttatgtatatgtgatctttacaccacaggtaacttaaaaaatgtgaatgctgttccctaacagacctttttactctcttcagaaacttcataacatggatatttgaaggaaatcctagagctgaatttaaagacggggtttgaggagacttgagtcattctgtatagtaaaataagattttgttgttttgtcattgtttacccataaaatgagggaggagagctaagcactatgcctatgaagcctgcattgcagaatctttcagcaagattaatgtcaaatgtggaattttaagatgttgacattactatatgtcaaagagtgttataacaaagtatcattaaccagtggcttataaacaacagacatttatttctcacagttctggaggcttgaaagtctgatatcaaggtgctggcagatttggtgtctggtgaggacccacttccgggttcatagatgacgccttctcaccactgggtcttcatatggttaaaggggcaagacagctctctgggaccaattttatttatttatttattttgagatggagttttgctcttgttgcccaggctggagtgcaatggcacgatctctgctcaccacaacctccgcctcccaggttgaagcgattctcctgcctcagcctcccaagtagctgggattacaggcatgtgccaccaccccggctgattttgtattttttgtagagacggggtttctccatgttggtcaggctagtcttgaactcccgaccttaggtgatccacccaccttggcctcccaaagtgctgggattacaggcgtgagccaccgcgcccggctgtctgggaccaattttgtaagagcattaaacctattcatgaaagctctgccttcatgacctaatcagctcccaaaggccccacctcctaacaccatcaccttggtgactaggtttcaacatgtgagttttagggagacgcaaacgctcagagtatagtagttatatccttccatgtccactatcgccacctgcacatgtgcctctcataaaaatgcattgaaaaggtgagtttggaggcaattaaccaaaaatctacccagttttagatttaggaaatgtaaatcttaaggaatggaaagccttcctgcagacgtctaagttgtgtttgggtgtgtatttatttgagtatatctgcatataagtgttaaagaatcggaggacaattcactaatacacattcgttatctctagaaaaaggatttttaacacatttgcttattccaatttctactataaaaatagatcactgtagtcatactcccacttatggttaagatggtataaccagaatgaggtaagtctcatttatttatcagcttaaactgagattccagggttgcagcatgcagagagagtagaaaccactgggaagccaagacagctagagttcacagagcagagagaaaaaaatcgcacagagatcaagcttgggagatctgcaaagggttcccctggggctgtccagtgagacctggtcagtagatatacacgggaggatcctacccaaggctggggaaggagccacgtgacaggagcacagggaacaatcctcagagcatacacaggagaagtaatggttgtgcttccaccagccagagaggaaaaccttataaggcatagagtactcggaatgctagagactaaaggctgccctgatcctacctgacaaagtttaaaaagaaagcctagtcccagcggggcgtggtggctcatgcctgtaatcccagcactttgggaggccaaggcaggtggatcacctgaggtcagaagttcgagaccagcctggctaacaaggtgtgaaaccccgtctctactaaaaataaaaaattaaccaggtgtggtggcatacacctgtagtcccagctactggggaggctgaggcaggtgcttgaacccaggaggcagaggttgcagtgagcaaagatcgcaccactgcactccagcctgggtgacagagcaagactcagtccccccccccccaaaaaaaaaaaaaaaacaaaccagcaaagcctagtcccagaataaaatttaaaatgacttttgggaataaaaagtaatagattattgttaatttccattactttaaaatctgatccattacatattatatgcgtgtatcaaaatatcacatatacccccaaaatatatacaactattatatgtcaattttttaaaagttgtacccagtcttcaaattccaactaaaatgctaactgattccttcatctgaatttttgtagcattcttttatggcaattaacacagtctatattttagagattttatccaattgtattgtaaatgggttttatctattaggttggtgcaaaaataatagcgatttttgcaattacttttaatggcaaaaaccacaattactttcgcactaacctaatggttgtgctgtaaattcccaggggatagggaacacccaagattcatacaactttgtgtaaatatgttaaccatcttgcattattagtgccttacataaatctgattttaaaatatatatttgcccagtaaatgaatatttcagtaaagtttaataaaaaaatataagtattaactggctattaattcatatgaatttatgtagaagtcttcttaaaaatttgagagttaacttaagaatcattctcatatcattattgccagcatgttttccaaagtatgagcctaaatatatggactagccagttctcatggccattagtgtacacttgtaaaattatttttatttatgttggaatttgcaaagtctattttcaaatccaactgggattatttttatggcagagattattacagcggtatttctaagtcatgtagaaaaaaatgtgaatctgggaggttctgtgatgcttagagatttcagttccaacttgttccagttgatgtcactatggcaaaggtatcccacacatgtggcatacagcagcgggggaaggaggatacaaatctaataatgtggccaaatcaagaggaaacgtatttgggggcaaggctaaaatgggaatgggagcatggcagaacatcaggattccacatctggaatcagaggggctgagtgaatgcatttacctgatcttctatgagtcagcaaaacaaacacacaaagccatcgtgagtttggaagctgtgaaactgctgctctttgcaatgacagatcttcctatgctctgaactgcagcaatacattgaggtagcagtaattacagactttcatatggcttctctgctctgtagaagtagtaaatgaacctcttggggctaaatttctagctttgggctcctgcaccatctttctccctacaggaagtcacgacagacaacagaggaagtccaaagcaaggacaacgctgtttatgaaaaggagtggtaatggttcagagtgaaaattaacagatgttgggataaaaatgtctgcctgggtactttatggctccaaagtaaataatatgtccctgagttttagcagctgtttagggactcctgtatcttagtgttagtttaaacggcaaggtaaaggaactcatgtaacttaacactgttcatcaacacaaacttactggatatctttctgaaatgtgaaaacagatctgttttcagatactattcaactgtgcaaggaggcaaacagatgtattcattaacactccccacagagcatattgtgatatttgcaaatggaaaatgctggagctgaggttacacaaatgttttctgttatgaaacttccttccataagaccatgattttcaaggaggatctcatttaggactgttttttgttgttatactttctgtaatgggtgatttttctaattaagataatttgcattttaaccttgttttagaaagtgattattctttttttttctgtctaaaggtagataatgttacctgtttaaattcatttttttaacccaagttttgcctcaggatctataagtcaattttttatagtaagatattggatgcccagtgaagaaaaggtttttgccaagctgaaagaaattcaaggcaagattgtgagatgtcattggtacaatacacaccaactaagaatccttgtttctgttttatgcctatgaaccaataacagtgatcagtgtggggacatttcattggaattctgcctgagaaaaagcaggagtgttcagtccttcagcgccaccaacagctctggatgccaaaggaccatgctggtagggctcagagtgctcagacagaagtatgaggcagagtttcatggggaaatgagatgggtctgagatgggtaggaagagggggaaaatgggcctctcaatgctctcatagcctcttaatgctctcaaaacagccactgaggcaatgaaatttttttttaacttttaggttcagagatacatgtgcaagcttgttatacaggtaaattatgtttcaagggggtttgatgtacagattattttgtcacctaggtaataagcatagtatctgataggtcgttttttgatcctcaccctccacccaccctccaccctcaactaagccctggtgtatgtggttcccttctttgtgtccatgtgttctcaatgcttagcttccacttataagtgagaacatgcagtatttggttttctgttcctgcctttgttcacttaggataatggtctccagctctgtccatgtttctgcaaagaacatgatctcattcttcttttatggctgcatagtattccatgctatattgtaccacattttctttatccagtctaccattgatgagcattcagattgattcctcatctttggtactgtgaatagtgctgcaatgaacatgcacatgcatgtcgtctttctggtggaataatttgtattcctttaattatatacccaataatgggattgctaaggtcgaatggtaattctaagttctctaagaaatcaccaaactgctttctgcagtggctgaactaatttacatgagcaccagcaatgtatgtatatgagcattcccttatctttgcaacctcaccagcatctgttatttttttacttttttataatagccattctgactggtgagagatggtatcccactgtggttttgatttgcattaattaaaagagatttatttatttatttatttgagacagggtctggctctgttgcccatgctggagtacagtagtgtgaacaggctcactgcagcctcaacctcccagactcaggtgatcctcctgcctcagcctcctgagtagctggggctacgggtgtgcaccaccacgtctggctaatttttaaattacttgtaaagatggggtcttcctatgatgcccaggctggtcttgaactcctgggctcacgtgatcctcccactttggcctcccaacatgctgggattacagacgtgagccaccacagccagcctgaaacgagttgaaaggcacagggagaacccaggtttctgtggactccaccaggacatgatggaaaatggaccttgaatgaaattccttgattacgtggctaggaagactcctggtatctgctgtggtaacttcaagccacagaggagagacagaaaattccctgagtccgggggataatagtcatgacaagggtgaaacagaaaacgaaaaaaaaagagaggaagggttgatacctgttgacagaataaacactacaaaggaaaatcatccttgtaaagtaaattctgtcaacatgaatcttgttcgtcaaatttgattttaatattgagagtaagatagttttcagtttgtctgctgggaccatgatgaagcactttcttcatctagaatttccctggtgatctttctggggatatttttctgtatcccaagctttcagcaaattttgatgtgttgcccactttgtgtgaagagagatacaaaagaagcttatgtgacccctgcttccccatgtgcaagacaaaactggcccctaatgaattgagatgagattcccaagatttggggacttcatggaagggtaaaattacaaaacaataacaatgttctagttttctaaggctgccataacaaagtcctatggactaggtggctttaacaacaggaatttatttcctcacaattctggaagttagcaatccaaaatcacggttggtttcttaggtcttgagggaaggacctgttacacacttctctctccttgacttttgacggatttcttttccatgtgtcttcacatcatcatctttctttttctttccctccctcccttcccctctctctccttccttcctttcctttgtttttttttttttttttgagagagtctcactttgtcacccaggctggagtgcaatggcactatcttggttcactgcaacctctgcctcctaggttcaagcgattctcccacctcagctcctgagtagctgtgattacaggcacataccaccacgcctggctaatttttgtatgttttggtagagatggggtttcaccatgttggccaggcttgtctcgaactcctgaacttaggtgatccgcctgcctcggcctcccaaagtgctggggttatatgcatgagccgccacacttggccatgtcatcttccttctgttgcttgtctgtatcggaagttcctcccgttattaaggataccagtcaaaaggtgggttattaggcccaccctaataacctcattttaattaatttacctttttaaagactctatcttcaaatacagtcacattctaagtttctggggtttggacctcaatatatgaatcaggggcttggggacagggggaacataattcagcccatagtaagctacaacaacaaacccacaagccaacaacctgaggtggatgacacatgctttcaaaatttgtattttgtaaaatcagaattaaaaaacatggctgggtgcagtggctcatgcctgtaatcccgacactgtggaaggctaaggcaggaaaactgcttgagattaggagttcaagaccagcctgggcaacacagtgagacaccccatctctacaaaaaatttaaaaattacccaggcatggtcatgtatgccttgtagtcccagccattcaggaggctgaggtgggaggaccatttgagcccaggaggtagaggctgcagtgagccatgatggtcactgcactccaggctgggtgacacagcaagaccctttctcaaaaccaaacaagcaacgaacaacaaaacaaaacctatgacattataatttaataaattaacagaaaaaggatgtactagtgatgtaatcaaagaataaaggagtattctttaaatacatttaactttttaagcatctcatatatttatccttattttttaggaccagtgaaattttgaaattttcattagtaactggtgaggatgtgctgaaatacattacggtaattgtaacatggcgccctaggtaaaatttggttctaatattttcaaaaccttaaatatgctggtagaaacctcgcaggaggtgaggcctaaatatatcctgagaccttgcttctgggaaaaccaccagaagggattatttgattatatccatattaagctgatagtttaaccaaaagagtaatttctaaggaggtagaatgttctgtgacatcatgagagaatgagagagcaagagtgacatagaggagttgaggaggtagagcagcccttttttttttttttttttttttttttttttttgagatggagtcttgctctgtcgccaagctggtgcaatctcggctcactgcaacctccaactcccttgttcaggcgattctcctgcctcagcctcccgagtagctgggattacaggcacgcaccaccaagcccagctaatttttgtatttttagtagagacggggtttcaccatgttggccaggatgatctcagtctcctgaccttgtgatccgcctgcctctgcctcccaaagtgctgggataacaggcgtaagcatcgcgcggggccgggtggcatttttataaagagtttatttccctttttaaatttaagctacactatgcctatgatctgctactctttcttatggaggtaggggtgtgtgcgtgtgggtgtgagagagtgtgtcttgttcttgttgttgcttctgttgttgttaaagaaattattcatgagtgatgcagggttgagacttagccattgatagaaaatacgtgagggcagatcttcatctcacacaaagagggaactcaagtgataaagtagaattgagcctggactataattttgatctcttgcatgtgaagctattaaaacagaatcatacatatttggagaaaggttctgatattatactaatgtattctggtgtgatttcttaccgatgccctatgacaaattccaagccctataggcaaagtttttgttgatgcaaaaggatattctcatcagttatttcagaaagaggtgcattctaaatgaggaaattaggactgacaactcagtccttagattggcttggcaaggagaaactgtatggcacctgtttctgttgtatagatctttgctggtagcacgggataccagtgtcaggagactagctcaaaggtactctgtctgggtagaggattacatactttctatcctcatgcacactgggccaaggcatccggtaaagatggctcctggacgaagagctctgaaagctgcagtatccattggcagctgaaataaaactgtgtattgcattgaaatgactttctgtcattcgagttaagtcctgaacgttgagttaagtcttactaaaggctgcaacctgtctcagttgtgctgagcaataaaagagtaggttccatgtttggtccatgtgggagggacttccgctctttagataatatattggtcctgatgttattaaattcttattttattcattataaatgttttacatgaactaaaagtattgcattaaaatatttattgcaatcactgagtttttctgtgcctctgcaaattttacaccccattatcagcactgattatttcaactataaaacgtcatgatctgttttacagtgagacaaggagttttaagtttccaagttcacaggaaatgaaacaagaaatgtaacaatatggttttatatcacattttgggaggctgaggcgggaggatcacttgaggccaggagtttgagagtagcctgggcaacatagtgagtctcctgtctctttaaaaaaataataaaacagtaaaaatttttaaaaatacaacttatcaaaatttgtgggatgcagtgaaagcagtgcttagaaggaaatttatagcattaaatatatatattagatgaaaagaaatatctaaaatcaataagctataggaaaggaaactatagaaaagaataagagtgatgcaaacagagaaaaaaataaaaattagagcagaaatcactgaaattgaaaataaaccaaagaaaatgaacgaaatcaaagctggacttcagttaataacattgtcactactggttcaataattgtgacaaatgtaccatactaatggaagatgttaataattgaagaagctggctgtgagacatgtctctgaactgtttgtattatctctgcaaatctttaaatacatagctgttacaaaaacaatgttttttaaaaaatattaaatatctggtttgagagggtgaattcattactaagcaagttggcagtatctgcttttaaaaaagctttgagaatgacactaaggacccatattttagagatggctcagatccgacatggccaagactcaggaaaggcatattttgggttccttttgaagtgtgaaatttgagtatgaaattgtctgagatcttcaagcagtcaccttccatccatttccaaatgggacaggatataaataagtttattgcttttgaaagatcatgtgtaaaagggctacaaaaacaaggacatggagaaaaggcagaaggtgcttctagaaataggattttaaaaagtgaaagttctgcgttaacaagacttgcaaaaaaactgcttaggttggcaagagctattttttgaaaaaggaattttgaaggaaagatcagaggtacttgtcccacataaggtctgctttagaaaagatgggatattaatattgctatgtcacctaattttgacttttagaacaggaacaccccaaataacaagggtggtgtaacaaaatagaaagcttgtctcattctcatattgaatttggagccaactgaccagggcttggtttcctcatctgtaagatggatgacaacagcacatcatggtgatggtcatcatcatcataactattagactgtggccgggcgcagtggcttacgcctgtgatcccatcactttgggaggccgaggagggcggatcacctgagtaggagtttgagaccagtctggctaacatggtgaaaccccgtctctactaaagatacaaaagttagccgggcatggtggcaggcgcctgtaatcccagctactcaggaggctgaggcaggggaatcgcttgaacttaggaggcagagtttgcggtgagccaagatagcagcacttcccaggctgggtgacagagcaagactctgtctcaaaaaaaaaaaaataaataaataaataaaaaataagaatcacaaacacatgtatgcacaacccaaacactgacagagaaagctctgtaaatgaacatcctaagcctcattcacacaggacagctttatagatttcttaacatccctgtttttagctatagaattgctaattgtgcaacaaatgctatagaggtgctcgcttggcataaaaaggaacagtgaaatccataagcctgaaatccatcagcatactgaaaaccaaaatgtgggaatactttgggaaggaagtatgtgtgtggtatgggagagagcactggctttgcagccaggtagatttagattggaccctgtcagagccactcactcatagcttaaacttggagactttgcaaacttcgttttctttttagttttttttggagacagggtctcactctgtcaccccaggctgaaatgcagtgacatgatcatgggttgctgcagactcaacctcccgggctaacatgatcctcccaccttagactcctgggtagcggggactatagttgggtgccaccacgctccgctaagttttgtattttttgtgtggagacagggtttcaccatgtttgccaggctggtcttaaactccactcctgggctcaagtgatccacctgccttgatctcccaaagtgctaggattacgggcacgggccacggcacctggcctgcaaatttctttcgtcctgcatttccccacctgtaaggtgaagatgttccctggagatctgtattgttaacgctcttaaaccagtgacacacccagaaactaggacagggatgctattagaataagaaaatatgagaaatatgaggataggaaaatgtttcaaagcaagttgcatgtaatgtaaactagatctctgaagacagggctgttatcttcctgcctaaaataagtggttctgtattatggaacttagctttagctggtggatactagccatgacattttgactcaatgaacaataaactcttccactgtctcacttctcaagaccccccagatgtaacctgctaaaacacctacagattattaatttttattcatatgctctctgacttggtagcaggggagaggcacttaacgttctttagacagaagatgaagaaacagacagtatgtcaacaaattgttagtgttaggagccctttaataacttcagcgaggcatccttttaggagctctaaaaataagcttcaaatttaaagtggcacctagagagctgagattacaggcgtgagccaccatgcctggccctatatttaaattcacgtgtatgcacaccatacccagaaaaccccctttgaaaaaaataacaaagttatttctaattggcaacatacagagttgtacagcttattgtttacaaaataaatcaaactcttaaactgaacgacaggaaagtgagagtttaagatgagagcggttttctgcaaattgggaccaatacctattttagtcaccattccaggtctcctgttatctgaatagtgtcttgtctgatagactaaacttacacaccattactattgttgataatgctaataaactagaaatcaatataatgaactttagcctgaaattccttaaatataagtctttgcattatgcccaaggtatttttattgtattgtcttaaaatttagattttaacatttcgttaagtttaacgtaagaaatgtattctttaagaaaaaacttccactttggatgttttttttggaagaaaaatgccagggacatcatcatacctagagagatttaaaaacagaatgaagctaaaaccaaaaatttggttttatacatttttttgagatggaggttttgcttattgcccaggctggagtgtaatggcatgatttcggctcactgcaacctctgcctcccgggttcaagtgattcttgcctcagcctcctgagtagctgggattacaggtgtgcgtcaccacacttggctaatttttttatttttagtagagacaggagtttcaccatgttggccaggctggcctcaaactcctgacctcaagtgattcgcctgccttggcctcccaaagttctgggattacaggtgtgagccaccgtgcctagcccaaaaatacgtttttattacagaaaaaaagttggtttctttggtacagatttttttcccccataacaacttgctataaaaaagtaagactcacctctcttcttccagcaacccccagggaataagattatccatccagtagagaatagaactaggaaagataaatccctctttgacttctgatattctatttttctgatgttttctgtacctccattactggtttgacataatatttggcctttgagtttttaacttttcccagttgtcattcttgagaaagtgaaaagataataagtttcaacataaatttggagtaagctccagttttcacacaaacacaaatcacaaggcacttacaatgtttcacgagctacaagtcttttaaaaataccacctattagccattgaacacagggctgttacaaacttatttatcagaggacatagttgctatgctctccatataacaacagtttcaaaaacttgcagccattaaaactacatttttttggccgggcgcggtggctcatgcctgtaatcccagcactttgggaggccaaggcaggtggatcacctgagatcaagagttcgagaccagcctggccaacatggcgaaaccccatctctactaaaagtacaaaattagcccggcgtggtggcacgtgcctgtagtcccagctattcaggaggctgaggcatgagaatcgcttgaacccaggaggcagaggttgcagtgagctgagatcacacctctgcactccagcctgggtgaccaagtgagacttcgtctcaaaaaaacaaacaaacaaaaacctttttttcctctcaaatcttttgatcctgaattaatacagaatcttattcaagtggatgctaactccattgtgtggaactttttttcttttctttttttttttttggacagagtcctgctctgtcgcccaggctggaatacaatggtggaatctctgcctactgcaacctctgcctcccgggttcaagcaattctcctgcctcagcctcccgagtagctggcattacaggcccccgccaccacgtccagctaattttggcatttttagtagggacggggttttgccatgttggccaggctggtctcgaactcctgacctcaagcgatccccctgcttcggcatcccaaagtgctgcgattacaggcgtgagctaccgagcccagcctctttgggacatttcttcttttctaaacatacagcagtggtggtgaaaatataaaatgaagatataaaaaggcatagtgatgctcaaaacccaaattagggtctgtgtagactgggaagcagcacttggacagagacagatgagtgagctgaagatccaggactgtggttgtgggtcggagttgggctctgtcgggataaatcgctccgcagaagacgggctagagtctgctcaccattgaaggaaaggccagtgcggtttttctgcccctgaaatgttattcagaactcctgctgctgacactttaccactcaggtttctgcgacagttgggtttctgtggacctgaagaagagggaggacacagactcacaagccggaacggcatgcgacgagccccccagaggcccataactgaactgcagtgtctccagccgcgccctgtgcaatgatttggttctgcattgcgccccctagaggtgagtggaagcaatgtccaagctgtgggcaagtaggattgagtacccgaagggagtgaaagcaaaaagcaaaacgcaaaaacagccaaggagcctgcaaaccaaatattgagaatgcatgaagaaatgcaatgccaagaaagaaaactgcaagatcatcatcaagtaaatgtgggtcagataaaaataataggacaatctgaaagaagactttcacataaatatttaaggtacttcaagggaaaattaagagaaatattctaaaaaaaaaaaagtaaaaggtagagaaaaaaatgtaagacaaaataggcataaataaaccaactatgggtaaacatgaaaaataactgattagaaatatgaaaaataaaaatcataaatataccttaagaaattggataaagtatattggacataattgaaggagaaaattagttgatgaaaccattcatgcagaaatagtggatagatggaaggctttccccatgtattcaaaagaaggtccagaaaagaaaatggagggaagagtagagaaattatatttaaacagtgactagctaaggctttctcagaatcaagttcaaacacaagtttttaaattaggagagggctgggtacagtggctctcacctgtaatcctagcactttaggaggctgaggcaggaggattgcttgagcccaggagttcgaggctgcagtgagccataatcacattactgcaacactacactccagcatgggcaacagagtgagatttttgtcgcaaaaaaaaaaagtaaaagttaaaacataaaataaatttactagaagggtagttcaagtaccaagaataatgaaaaataaaccaaaataagacacattatagtaaaactaggaaaatttaagttactgggaaaaaagattaccacatattaataactgaagttattatcagcaaagatagatgcatagagtgaaatagtatcttaaataaccttaaaggccataattattagcctagtgttttatacccagagaatgagggctatactaagagttggccacagatgtcttcttaattaaaaacaatactggttgggcatggtggctaatgcctgtaatcccagtactttgggaggccaaggcaggcagatcacaagatccaggggttcgagaccagcctgaccaacatggtgaaactctgtctctactaaaaatacaaaaattagacgggcgtggtggcacatgcctgtaatcccagctactcaggaggccaaggcaggagaatcgcttgaacctgggaggcggaggtcgcagtgagccaagatggcaccactgcactccagcctgggtgacagagcgagactccatttcaaaaagaaaaataaaaaataaaataaaaacaatactaacaacaaaaaactattaaaggatatacttcagcaggaaaaaatctgaacccaaagaaaaggcattgagatacaaaaatactgtaaatatggaaactgataaaatattttggtgagaataatatggactatgtaaataaaattatacctctaagcaagaagaaaatgaaagagcagaaaagcaataatgaagcaaataaaaagtatggtgatcaggaagatcaggaaaagaaaaagcaaagaatgagaataagaaaatagaaacaattccagctgtgtaaataatcactaacggtagacagattaaactcaccttttaaagagactgaaatgatcagaatggataataaagcaaaatctagctgcatgttgcctacaagaggcataggttagaattttaaaaataaagggatgtatagttatgcaaaatgggaacagtgagtgagaaaagggtgctaaatacctccttgcacattttttgctgtggcaagtttctgtgaatatatagttatttcaaaatagttatcaaaaaggggagtggataaaaagctatagcattcaagtatcaaccgagataaaggggcatagcaatattaataccatacaaaatcgaatataagacaaaaagaatttaatagggataaaaagatcagtccataataattgaaagaacaatccactgagaaaatataataattgagaacctgaatatacctataataaaacccagaactgtatgaaacaagttcttatggaattaccaggagagagaaaaccacatagtagtaagattccagtatatcactatcagaatctgataaattggaccaaaattagtaaggatgagatttacaaaatacattggctttatctgatagatacctagaattctctctctggcaagcagacatacatttttagagagtatttacaaaaagtgtacagggcatttcaaaaattaaccacacactatatcactaaagaagtttcagcaaatgtcagggattgaatatgacatagacaatgtgctcgcctcatcattcaattaaatggtaaatcaacaaatctgctttttattttttattatttttagaaatagggtatatcactttgtcacctaggctggagtgcagtggtgcaatcatagctcactgcagctatgattgaacctgggcttaagccatcctcctgcctcagcctctctagtagccaggactacaggtacgtgccaccatgcctgactaatttaaaaaatattttgtagaaatggaggtctcgctatgttgcccatgctggtcttgaactcctgggctcgagcagtcttctggtcctggcctcccaaagtgctgggattacctgtgtgagctatcatgcccggcaaagtcagtttttaaaactattcatatggctgcaaacctaagaacttacttcaaaagaattcccacaaaagaattaacaaaattcttagaactgaatgataattaaagtaagtatatcaaaatatatgggattcaaatattcacattaatttctaactttaaatgcactcgtttaaaaaagaaacaagaaagaaatgagtgaagaaggtgtctcaagagctagataaggctgggtgtggtggctcatgctgtaattcctgtactttgggaagccaaggtgggaggatggcttgtccgcaggagtttgaaatcagcctggtcaacataatgggacccccccaccatctctagccccccccccccgaattgtttttaattagctaggtatgctggcctgcacctgtagttccaactactactgaggttgaggtgggaggatcacttgagctcagctgtgaggttgaggctgcaatgagttgtgatagcatcaccatactccaacctgggtgacagagcaagactctgtctcttaacaaacagctagataaatgtaaggaaactataagaacagaaataaagacagaaatacaaatgaatgagataaaataggaaggaatagaaagggtcaaaaacgattaggattaagtaaaagagaacaaaaatatatgaaatttagaaatcatgagtactttgagcaattttataccaataaacctgaaaaattgtgcaactgtaattatctaggaagaaaagtattaacaaactcaagaaaaatagaaaaaaattgatacccattttaattacactgatattatcaaagcctcccttgataggtgtttcatggactcaaatatgtgtctcaaatctaatggcagatgctgaaaattgcaggcaggttatttaagacagtcattttactcatgaataattctgtgtagttctctttcctctggagagaagtagaggtttttcatttaacaatgattaatttttttctagtttatcctggggagtctggcttgttataaacaatactggaggaataattttttggtaaataccgtttgtctgccaaattgatgatctctttagagagtgtttttgttgtctggttggtgtttttttttgttttgttttgttttgtttttttttttaagagatagggtgtcactctgtcacccaggctggagtgcagtggtacaatcatggcacattgcaaccttgaacttctgggtttaagcaatcctcccacctcagcctcctgtgtcactaggactatagatgcatgccaccacacccggctaaaattaaatttaaatttaaatttaaatttttaattatttttttttttggtggagatgagggtctcactatgttgcccaagctggtccccaactcctgagttcaagtagttctctcatgttggcctcccaaagtgctgggattacaggcgtgagccactgtgcccaaccaagataaattcttgactgtggaatttctagatcaaaagtttcagtgcacttactggttgagaaaacaccatcccaggcaccatctcccagtgctgcagaggggaagactacatggagttagaacagctagagttccaggactaaccccaccctgtcacacatcctttctcacttagctactgccagaacaccaaaccccttcaatctgtatgtctagtgagatcatgtaatttattgtctgaacttggacatacactaaactgcatgtcaggatgacacatacatgcggggacagccttggggggttttgtcatcttactcatgacccctattgttcaaagcacgtctcccataaatctgacttgatcctctgtacccctgcccctaccacgcccacacccatatttttcactgtggccttcaggtctgcacacagcagatctgcatacattcggtctctttgcgaaatgtttcttttgcttcctgaattcaccagaaatgcagctctccgttgtgaacactcttctccctttgacttggtgctgcattttaggtgttattgaccgggttaagggatacgcagaaacatttctgggtgggtctgtgagagtgtttttggaagagattagcattcgaatccacagactgagtaaagaggatctgtcctcatcaatatgggtggacattattcaatctgatgaaagcagggatagaataaaaaggtggaggaagggtgaatttgccctctcttcttgagctggggcatctatcttctatccttgaacactggagcttctggttctcaggccttcagactctgggacttacattactgagaccgctggttctcaggcctttgacctcagattgagagtaacaccgtcagcttccctggctctcagatcttcagaccaagactgaatgacaccaccagctttcctgggtctccagcttgcacacagcagatcatgggacttctcagcctccataattgtgtccagttcctataacaaatccgctgttacatatcttatacaaatcctattgcttcccttcctctggagaacttgaccaatacacaccctcttcaggggagctattttttctcttatactccttgtatatcagggtgagaatataaaattcaaaggcttccttcttgcatttcactgctatttccagaccatttatccatctttttggggctggggagttgggggaaggaaagatttcactctatctttgaggcttagactacctgacttgaaatattccctcctctttatggctgttgtctggtggcatccctaccactcctcctcatggctgaggatcgactgtcagctataaacatttatctctacatagactgccatcacaatgaccagcaacttcaacaattaacatgatagattggctctttgatagtattatgtagtggccgggtgcggtagctcaggcttgtaatcctagcacttttggaggccgaggtgggtggatcacctcaggtcaggagtttgagatcagcatgacctacatggcaaaacccaatctctactgaaaatacataaattagcttggcgtggtggcacgcctgtaatcccgcctactcagaaggctgaggcaggagaattgcttgaacctgggagacggaggttgcggtgagccgagatcgtgccactgcactccagcctgggtggcagggcaagactccgtctcaaaaaaaataataaataagaaaagataatattatgtagttactgttattcattttacatttgataatgtagtgtggaagttttttcaaagagtccctttaaaaattagatgccaatctgatatatttacacatataagcatgtgagtgtctggatttgcttccaatggtaaaggaagattggccatgagttgataatgactaagatgggtgatgtatggatggaggtttattatgccctctctactttttatgtttaagggttccgtaacaaaacagcaaatgaatctgggtgttccaaaccaccatgagctcttttttccttgactgctactcccatggaatcactcagtgtcatagtcagacttaaccttgtcagcccagaaattaccacctccaaaattcccatgtcatgcctctcattctcacagcactactgcctgtatttcaagctcccttacttattctaggaaattccagcattctcaacctcattaagagttccattttggctgggcatggtggctcacgcctgtaattccagcactttgggaggccgaggcaggcagaccacttgaggtcaggagtttgagaccagcctggccaacatggtgaaaccccatctctactacaaatacaaaaatttgccaggtgtgggggtgggtgcctgtagtcccagctacttggaaggctgtggcaggagactcgcttgaacctggaaggcaaaggttgcagtcagccgagatgccactccagcgtgggtgacagagccagatgacaatgtctcaaaaaaaaaaaaaaaaaaatttttttttaaaagtgctccatttcattgacccaaccaccacattctctcttgttcctcatcccctttgtgtattcatttgcctcctcgtctagcttaaatgatgttgaaaattcttgccacgtcttcaactcccttgctttttttctttctgacatacttgactaaggaaattctgacagttgaagtctactgtctgccatcctgggaccagtggttgagcagctgaacatttttaggagaaattcacccaaatgggctgacttatttatctttaaattcatgtttacaacatttgaactggcattcaacactgtccagtaacctaccaaaattttcctaatgtctgcctaccaagatgactaattcatcagcctctcctctttcatcaatcctgttgcccaccaattatagctgatgatatccttcgcgcatcactaaagtgataaaattaatctgagagaaatattttactttctgattaactaaatcttcaaacctcttacatctgcattcccttcttcctatctattctttcctttccctaaataacaatttctccacatgctgtcagaacaattttccttcccaggaacttagcttctttgatggtctgcactctgtctgcattactagtctactagtttacactggatcattcccaccagggcctaggctagctgggacttctcaaactgaaatttgcacatgagtcatctggaagtctcataaaaatgaaaattatgattcagtaggtctggggtggggcctgcaattcttcatttctcaaaaactccaagctaatgcatgggttcatgcatctcattctttgagtaacaaggctttagtgcattttagaatccaagtaacaggtgtacatatggtagaagtacaagcagaagtgatatgagaagtaccaagcacagcacaggtatcaagcctcaaaagaaaaacaggccatatctctgcagaagcaagcaccttagggccttctgctaggtccaggtcgaactgtttagtgtgcagattatgaactggtccagaactgtccagtggcagttgtggggattggggagcttagagcagtggattttaacaactgtgcttgagtatttcaacaatcagtaatttgtaccagtatgtaccagctgaatgcagcaaatatggtttggatattcatctccaaatctcatgttgaaacgtgatccctagtgttggaggtggggcctagtgggaggtgtttcagtcatgggggcagatctctcatgaataggggtgctgtcctcatggtaatgagttaatccctctgtgagttcacatgagatctggttgtttaaaagtgcctggcaccccctccctctctctctcgctttctctctcacagtgtgatgctcccgatcctccttcaccttccatcatgattgtaagcttccttagtccttgctactagcagatgctggcgccatgcttctcatacagcttgcagaaccatgaaccaaaataaaccttttttttttaaataaactacctagtctgagatattcctttatagtgatacataactaagacagcaatctttatgtcatatgacaaattttagaagaaattaacaaaatattcagagagacagctctgagctcaagttgggaagaatattcttacagtgccaaccaaaagtgaagtgggctgagtgaaaaataatttcctattcctgaaaggatttaatcccaagtgaagtatttgtcacagaatacatagagaattgtttgggttacagaaaaggggtccagatccagacctcaagagaggattcttagatctcatgcaagaaagaattcagggtgagtccacagagtaaagtgaaagaagtttattaagaaagtaaaggaataaaaaaatgctacgccacagagagacagccctgagggctgctggttgcccattttatagctatttcttgatgatatgctaaacaaggcatggattactcatgcctcccccttttagaccatatagggtaacttcctgacattgccatgacatttgtaaactgtcatggcattgtgggaaggtagtagtgatgatgaccagaggtcactctcatcgccatcttggttttggtgggttttagccagcttctttactgcaagctgttttatcagcaaagtctttatgacctgtattttgtgctgacctccgatctcattctgtgacttagaatgccttaaccaactgggaaggtagcccagtaggtctcagcctcattttacctggttcctatttaaggtgaagttgctgtggttcacacctctctgacatttgaactagataatttaagattccttgaaaccttagattcaatgagttctactccagtagagaactattatcactccagtgtcatcttaaaaaaaaaatctaaaactcaattggacttcaaattgcagtttacttgacgtcacagtttacagactgttcagattttttcagaaagaaaaattttaaaatatttaatggatcaaaaatagatattctttcccaatctttctaattcttttctaattttctttttctttccttattgcacctaataagtaaatttttcaagagcatagaaaaacagtcaataaacaaaaatcagtttctgaagactcgtggtaaacagttggaaagtgaaattatgataaagaaaaacatttacaagcaaatgcagccagaacatgatatacttagggataagctgaacaaaatacatgtaagacctgtttgtatacccaaaactacaaaatagtgcttgaagaagtaaaagaagacataaataaatggaaagatataccatgtgattggaagatttaatattgcttagatgacaatttttcccaaattgatctatagattcaatgcatccctgatcaacattgtataggctttttttttcagtagaaatttgagctgattctaaaatttatgtgaaaatacaaaatacctagaatacccggggcaatttagaaatagatgaacaaaactggaagacttacactacccaattcccaacctaccttcatcatgactgtgacattggagtaagactcaatggactaaaatagagaatctaaaaaccttgcttatatggtcaattaaattttttttctcttttttttgagacagtgtctcactctgttgccaaggctggagtgcagtggcaccatctcggcccactgcaacatccacctccgcgttcaggcaattctcctgcctcagcctcctgagtcgctgggattacaggtgcgtgccaccatgcctggctacttttttgtatttgtagcagagacggggtttcaccatgttggccaggctggtcttgaactcctgacctcatgatctgcccacctcggcctcccaaagtgctgggattacaggcatgagccatcgcgcctggccagtcaattaatttttgacaaagttgctaagaaaataaaatgggagaataatagttttttcaacaaatggtactggaataattgggtatctgtatggacaaaactgagcctcaatcatggtatcacaccatacgtgaaaattaactaagtaaatcattaaatataaaagttaaaacttctaaaagaaaacttctaaaacaatcttgaagtggaggcagatttcttagaacatgaaaattgctataacctatataaatgtgtaaataaatgggactttatgcaaattaaagagtgtctatcttttgaaaaactatgtcaagaaaccgaaaaggcaagccacagtctgggagaaaattgcaatatatttttctgacaaagaacttgcatccagaatatacaaagaactcgaactcaatgaaaagtcgacaaaatattcgaacaaacattccaataagacgatataaaaatgaccggctgggcgtggttgctcatggctgcaatcccagaacttgtaaaggccaaggtgggtgaatcgctcgagccccagagtttgagaccagcctgggcaatatagggagacgttgtctctacaaaaaataaaaaatgaggtgggaatgttgcttgagcccgggaggtggaggctgcaatgagccatgattgtgccactacactccctcctgggcgatgggagtgagaccctgtcataaaaaaataaataggtcgggcgcggtggctcatgcttgtaatcccagcactttgggaggccgaggcgggctgatcacgaggtcaggagatagagactatcctggctaacatggtgaaactccgtctctactaaaaatacaaaaaattagccgggcgtggtggcgggcgcctgtagtcccagctactcaagaggctgaggcgggagaatggcgtgaacccgggaggcggagcttgcagtgagccgagatcgcaccactgcactccagcctagacgacagagcgagactccgtctctgaataaataaattaattaataaggctaatattaccataagaagatgctcatatttatttaggcatcagaaaatggagattaaagccctattaagataccactacacatcctacctctgcgagaatggccaaaattaaaaagactgacagtgccagttttggtgagaatgtggagtaactgggactttcaggtattattggtgggagtgaaaatagtatggtacgcaaagctgcaataatcaaaacaaaactggcatggagacagaccatagagactagtggaatggaatagaaaaaacggaaataacccctgtcacatatggtcaaataatttttgacaaggttgctaagatcattcaatgggaaaagggcagtcttttaaacaaatggtactggaaaaactggatgtccacatgcatgacaatgaaattggtcccttactttacaacgtacacaaaagttaactcaaagcggatcaaagacctaaacataagagctaaaactataaaactcttagaagaaattatagcagaaaattttcatgatgttaggtttgaaaattatttctcggatatggcaataaaagtaaaaatagataaatttgactaaattaaaatttaaaacttctgtatatgcgtatgaatagccaaaatcaacaaatgaggaaaaagcaacttacacaatgagaacatacttacaaatcacatttctaataaggggttaatatccataatatacagtataaagaactcctacaactcagcaaagaaaaccaaacagtccaattttaaaaacgggcaaagaatttttttttttttttgagatggagtttcactcttgtcacccaggctgcagtgcgatggcgcaatctcggctcactgcaacctcagcctcctgggttcaagcgattcttctgcctcagcctcctgagtagctgggattacaggggaccaccatcacactaaggtaatttttgtatttttagtagagagcgggtttcaccagttagccaggcaggtcttgaactcctgacctcaaatgatctgcccatctcagcctcccaaagtgcagggattacaggcataagtcaccacacctagccttagggcaaataatttgaatggacatttctctaaagatgtacaaatgagcaacaagcacaaaaaagatgttcagtattactaatcattagggagatacaaatgaaaaccacaaagagatactactattaaaaaacctgaaaatagcaactgttgctaaggatgtggaggaactggagaaattcactgttggtgggattgtaaaatggtgcagatgctgtggaaaactatattgttttcaaaacaaagattgaatataaaattaccatatgatcaaaccactccccttctggttatacatcgaaaagaattgcaatcagggtctcaatgagatacttatccacccatgttcacagcagcatcatttaaaatagccaaaaagtagaagctaacccaagcgtccactggtggataaataaacaaaatgtggtatgtacatacaatagaatattattcagcctcagaaaaggaaggacgttctttcttcttcttttttttttttttttttttttttttgagaaagagtctcactctgtcgcccaggctggagtgcagtggctcgatctcagctcactgcaacctccacctcctgggttcaagcaattctcctgtctcagcctcctgagtagctgggactacagttgcatgacaccatgcctggctaatttttgtatttttagtagagatggggtttcaccatattgctcaggctggtctcaaactcctgacctcaggtgatccacccgccttggcctctgaaagtgctgggattacaggcgtgagccactgtgcccagccaaagaaggacattctgacacatgctacaacatggatgaacctagattcaggacattatactaagggaaataagccagtcagaaaaagataaatactgtatgattccacttatatcaggtacctcaaatagtcaaattcataaagacagaaaatagcatgatggttgccaggagctggggaatagagagaatgggaagttgtttaatgggtacagagtttcagttttgcaaagtgaaaagacctttggagattggttgcacagcaatgtgaatgtacttagtgctatcgaactgtatacagtcatccctcaatatttgtgcaagattggttccaagatcctgctcattgccaaaatctgtggatactcaaatcccttatatagaatggtagtatttgcatataacctctgcacatcctcctatatactttaaatcatttttagatcgcttataatacccagtacaatgtaaatgctatgtaaatagttgtcagactgtgttatttgtattaattttttaatgttgcattttaaaaaatattttgactgctctgcattcggatgaatctatggatgtggagcctgcagttacagaaggcctactgtacttaaaaatggttaagatggttacttttatgttaattaatttttaaaaattaattttgaatagtatggtacaacccctttggaaaacacattggcacttttttataaagtttttttttttttttttttttttttttaaaacagaatcttgctctgttgcccaggctggagtgcagtggcatgatctcagctcactgcaacctctgcctcctgagtagctgggactacaggcctgcaccaccacacacagctaatttttctgtttttagtagagatgaagtttcaccatgttggccaggctggtctcgagctcctgacctcaagtgatctgctgcctctgcctcccaaagtgctgggaattataggccagagccacgcggccggcctcttttctataaaattaaatgtacactttccataatatccagaaactccattgctacacttttacccaagataaataaaaacatgtcctcaaaatgacttgtatgcaaatgttcacagcagcttaattaatagccccaaattggaaagggccatcaataagtaaatggataagcaaattgtgatatttatacaatgaaatactttttagcaatacaaaggaatgagctattgacacatacaacatgggtgaatttttaaaatattatgctgagtgaaagaagccaaaacgaaaaagtacttactgtattattccatttatacaaaattctagaacaggccaaactaatctgtaaaggtggaaagcagatcgtgtcaaagggagaaaacaaaattgacccaaagggcatgagacgggggtgatagaaatgttctgtattttaagtgtgttgggggccatgtctgcacgcagttttggagcaagcaagcaatactctttcttggtcaagcaaatgaaagcgtttcccagattctgataaaaggagcaagagactctctgctagaatattgatttgttccctgacatttacagtgaggtacttgaagaactcccaccaaagctattcacaaatgtgaagctgcagagttttatgtacggtcgtgggtgttacttgccaacatttaccccgactttgctgtactctttcagcatgttgatattctcagtaattttcaggcctttttttttttcctttttttcccttgacttctcatcagctccaaacctcagatctctgtttccttccaatacaatttctgagtccagagtgacatgaagactgacatagctcacccacgaaattgaagtccattgaaaaatccccattgcttggcttacagtccacctttctgtatctcaaaagcatttgattaatctctcctgatttcccaccatgatccatgtggtggttgcaccaggcatcctctctcttcttcttcccacaacttgtctttctgccagggactttgcttccagtgttactgagaagataaggccatcacatgtgactccctcagttacacgttattcttcatgttatttttgattctgcgcttccagctttgccagcaacctaagcctaggtaggtgctcttcttctctgttcattcttggtgctgtagtggctggtgggggttcattccacatataagctattcattgccattaaggctttcacttgcccgttttaaacaattttattccatacaaaaatattccagaactttttgtacaagtcactgcctcatttaccatttgtaccaattgtactaattatatcaatgtacctgcccacaaacaatgtgtaagagggattttcactgcactcaacaatccttagagaggcaataaagcatagtgggtgaaagagctccaccaagtactagccacatgaccttgactgaattagtttgacttctgtgctttagtttcctcatctgtaaaacagggataaataataagacctagtagggatgagttgttgcaaagagtaaatggctggtagatggaaaacacttggcgtagtgctatataatagtgcttagtaagtgctatacacacactaaatctgtgcgtgttggtagctgaaagtagctctgttggggatttcttctataagtaataatgttgaacatttattcacatgtttttggtcatttgttttcttttgggaaatgccttttcaagtcctttgccaatttgtttttgtttttgtttctttttcaaccctggcctacagaactttgccaatttgtaatggcccacaaatatttcttcactgattttcaagctgtttatgagctacggctattaactttctgttatcccgttttattattcgaaaatagcttttcggtctgttattggcctttatatttgtttatagcatcttaacattttttttttcttctatgactagaagattctttccattattgtatcacttaaagtttctattttctgtattttctccttcctcccatccccagtctggcaactgatagaaagtgccttgagctctttggaggaaagtgcccatctgaagtgctcattattcaattttggggctgtttagtaaataataataatgtttctaaagagataactccatactgtacttgtaaatcaaggaatttgtcctccagtctcctcaaagagtgaggctattactagagaagtaccatcattggctgaaaaagatggacatttgaaaagccacatataacaaatgttaaaaaagaagcctccttcttgagattgaacactgtcttctgtagacttccctcaggaaatgaacctccgagagctgctgttgttgcctttgcttctctggccgtttgtcaagctaaattgagtggagctcctgtgtgttgtctgtttaatcgccctctttgacagaagctttctcattacctacctggccctgttgcaaaccagcgcctggaggcagacatattgcacaccatttcctccagggtcttgctgcaggttgtctctgggaagtaatgaaaatctggaatgttctcagtgggcgggcttcagacccactgccccctgccatgaaccctcagcaggccagcaatgtagtaaaagccattagtgaagaaatctggaggagttcacctctaggcaggatgatttgacttttggaagatattctggagttagccaagatatttttatctgaaaattatttctgtcttataactgttccctggaggctctaagaatagcaaaaactgacaaattttgtttttgttgtggtttactttcctttaatctgctaacgaatctttttggctccacatgaggctgtgtctctgcagctgcattcttcagggctgtttcccctcagtgtttggggtattctggcctttgatacagaatcttaatcttaagctgtcttgccatgacaggtgttcattttgcccaagacttcttagtttaggtgaatgtcaggcagaaactcttctctcttcaaaaagaaacattagagcagaataagaaaaagcaaaaccacctttccagagcctttttaataaagggattcttctgtgtttataggttgtttcatgaccttgaggatgacttgcaggcaaaataaattattcagaggttaccttggttttcaaattaataagcaggttgttaaaggaatgctttcaaagccctacttcttagatttcaaatcttacacgtctagcaatttgtttttctttttttttttttttgagacagagtctcattctgttgcccaggctggagtgcagtggtgcgatcttggctcactgcagcctctgcctcccaggttcaagcaattctcctgcctcaggcttccaagtagctgggacttcaggtgcatgccaccacacctggctaatttttgtatttttgataaagatgggttttcaatatgttggccaggctggtctcaaactcctgacctcaggtaatccaccctcattggcctcccaaagtgctggcattacaggtgtgagccaccatgcccatccaagtctagcaaattttaagacacacaagggaatatagtgggttgaacagtatcccccccaaaattcatgtctagccagaacctcagaataggaccttatttggaagtaggttcattgcagatgtcatttccataaggatcaagatgagatcatactggatttgggtgagccctaactctaatgagagtgcccttcttagatgcaggaaaacacacacacacacacacacacacacacacacacacacacacacaagaacgccatgtgaagatggagacaaacactagagttaatgctgccacaagccaaggaattccccgagccaccagagacttgaaaagtcaagaaaggatttttctttttcttttttggagacggagtctcgctctgtaatccaggctagagtgcggtggcgggatctcagctcactgcaacctctacctcctgggttcaagcaattctcctgcctcagcctcctgagtagctgggattaacaggtacccaccaccatacccagctaatttcttttgtattttagtagagatgtggtttcaccatgttgcccaggctggtctggaactcctgagctcaggcaatctgcccgcgtcagcctcccaaagtgctgggattacaagcatgagccacagcgcccagccaggaaagaacttttctaaagaattgtcagaattgtctgtgagagcatagccatgctgacacctttattccagtcttctggctctggatatgaaaaaaaataaaataaatttcgggtttttttgttttgttttgttttttcctgagatggaatcttgctctgtcacccaggctggagtgcagtggcgcaatcttggctgcctgcaacctccatctcccgggttcaagcgattctcttgcctcagcctcctgagtagctgggattacaggcgcctgctaccacgcccggcgaatttttgtatttttaatagaaatggggttacaccatattggccaggctggcctcaaactcctgacctcacgtgacccacccgccttggcctcccaaagtgctgggattacaggcgtgagccaccgcgcctggccaaatttctgttgttttaagccacctagtttgaggtaatttgttacagcagccctagaaactaatataagggggtttgatccttggctttatttacaaacttaaatttctttaaacaaaacggaagctaaggtatttgattacctttttaaatatttcagttatctaacaaactttccaagacacttgtgtcttgatttaattagctatttccctatttcgaacacctctgttgctttcatttttttcttgaaatcataaaaaatatagcaaagtgtacattaattgtaaactatatgtacatttctttgcaaaggtagactctggcattaaaactgttagcatttgggctggtccagtgtgcttggctgatgggagcacagtgctgatgagactaagatgccaattagccctaaagagagaaaagctgtgtcctccatggcccggctagaacgtttgattcacttaacaggtgcatgccactgggcaaccagggagagatgtacccatccattattgttaaaggataaaactcaaacatttatattggtttctctgatgacaccaactttatgttttgacaaggaacattatttatactaatatgtgaaaatagctaaagcttcattcagacattaatctcataggaaatgtttgcacaaaaggcagggagatggaagaccaagacttcacatgacatttcatcacagaccaatggcagaatgagctacagaatgcagttttaacactatatgtctagtggcataatccttctagctttaactggcagctttttttttctaggactaaagccaccagcataataaacatcttttagatctgccttcaccacagaactgtttttaggaaactcatctatgatcccaggattcactgtttgaaaggagttgctggtgttaccttcagagaccttaaattggtttgaaattatatagtcactaaagagattgtgattgttattttaagtttttttttttaatttgagatggagtctcactctgttgcccaggctggagtgcagtggcacaatttcagttcactgcaacctctgcctcctgggttcaagcagttatcctgcctcagcctctcaagtatctgacattacaagtgtaggccaccacacccagctaatttttgtatttttagtagagatggggttttgccatgttggccaggctggtctcgaactcctgacctcaagtgatccacccacctcagcctcccaaagtgctgggattacaggcgtgagccactgcacccagttcattttaaactatgcctcagttttctcctttctaaaatggggatcacaaggacaactacttgatggagataattaatacatgagtttaacataatatgctcagtaattggtacaaaaaaatagcataaataagacctactatttgatagcacaacagggtgactatagtcaatagtaagttaattgtgcattttaaaataattaaaagtataattggattgtttgtaatacaaaggataaatgctggaggggatggagaccgcattctccatgatgtgatttttgttgttttttttttttttttgagacagagtctcgctctgtcgcccaggctggagtgcagtggcgcgatctcagctcactgcaccctccgcctcctgggttcatgccattctcctgcctcagcctcctgagtagctgggactacaggcgcccgccagcatgcctggctaattttgtgtattttcagtatagacgcggtttcaccatgttagtcaggatggtctcgatctcctgaccttgtgacctgcccgccttggcctccgcaagtgctgggattataggcatgagccaccgcgcctggccatgatgtgattattatgcattgcatgcctgtatcaaaatatctcataagtgtgatatacatcctccatgtactctcaaaaattaaaaattaaaaaagaacatgcttaaaacagcctttaaactagtagccatatataaatgttagctgttacttcttctttaggctttggacaaggaacgtatcttttctgtgtaccagtctatttccagtgccaaactatagtgccaagcaaatagtgagtgctcaatgaagatttgcaagcgacttaatagcaattgaaggaacacagagggattgactttgccttgccttcttgacctgttttatgtttttgtttcccttaaactttataatttagggattaggagcagctggttgcttatgttcataactcaaaacacaaaaagagctcagcgggtctaacagggagcgcagcaatgtctttcactgcttagacggtgaacggctaaagtttatttccacgttaactgttttcattgatgaaaactggttagaacattatttttggagtgttagatactgaaaagattgactgtaaatccataattttcacagctgtgttctccaaaattttctttactcctacaagtgaagaatgaaaattacagaaatatatctatgtgtgcataggaagtcgtttgcttttgggaattctccagttggtaattcagttaatttgctacagtaacttacgatctccttctcagagttaacttcctgatcctcttgaattgcaggtgtatttgtcaggtgtggacaggcaggtctgcggttgggcttgcgtcttcctcaacagttctacttctgccaactgggttataaaaagctctgctgcaatctggtggtttaacttgaggtatagtttccccgagagacgacgttaggccttaggtttcataaccagaccaagcaattcaattaatcttactatccatgaagggtaattggatgtaaatagcactagagaatccagccatcgtttatgacgatcattgtaggggctgtttttaggctgtcaatttagtgagctagaaatacatctttcttaaaagtgaaattagggactacacttctctccatcctccatttgctgtctttgaaggtgaagtgataattctggccaggcgtggtcgctcacgcctgtaatcctagcactttgggaggccgaggcgggtggatcacctgaggtcaggagtttgagaccagcctggccaacatggtgaaaccccatctctatgggaaatacaaaaaaaatagacagatgtggtggtgtatgcctgtaatcccaactactcgggaggccgaggcaggagaatcacttgaacctgggaggcacaggttgcagtgagccgagatggcgccactgcactctaggctgggcaacagagtgaaactccatctcacaaaaacaaaaacaacaacaacaacacaaagaaagaaagtgatgatgcttctagtcttcccctaagtaggagatgactcctctggacaaaggatgagaatgaagagtcagggggaagcaggaagccctggaaaacaagaaccatctgctgggtaacctctgagcttagtctgccttttttgaagttcccagggcttgatttatggcacaccatgaactctgttgttacaattctttatttccaattacagcatgatcttcttattgaatgatgagttcctagaagattgatccttgatataccctttatcatcactgtttaatcacaacgcctgccacatagtaggggctacataattgttgaaatgaaatccctccagtttctaacctttcctaacctgttcaggagaattatataacttgataggttcttcactacctttcctgtcgctcaaggaagaactcagctttcttgatatatcttgtgaatttcattccaaaaaagtgaaataaaaatagggcatctatttctacccagaccctgtagagaacgacaacaggccatgtatctgataggtgtgttggccatgtgtcggtgtgctagcctgtgtgaaccttggtccctgtaaggagagggtatccccactaagtgagtccccgtccgtggtaattgtactctatgccagacagtcagataattctgagtggtagagatcggctggatttccaatgtaccctaacaatagactgtgttctatcctgccttggtttacctgagacgcttctgcatctttttttttttttttttttttttttttttgagacggagtctcgctctgtcgcccaggctggagtgcagtggcgggatctcggctcactgcaagctccgcctcccgggttcacgccattctcctgcctcagcctcccaagtagctgggactacaggcgcccgccaccacgcccggctaattttttgtatttttaatagagatggggtttcaccacattatccaggatggtcttgatctcctgacctcgtgatccacccacctcagcctcccaaagtgctgggattacaggcgtgagccaccgcgcccagccgaatcttttcagcctgttccaactcttacctctttatttgagttaccatgactaggactcaattgctggagataaaaaaaatcttgaccaagacaatacaggtagttctttaaggaccaaaaaaaccccatcttctacatttaagaggaaaaccaatctcacaggtctttacaggaacagagaaggacagcagggttagagatctgtacatacattgatcaagtcaggtgtggttatgtgctggacctcagttggaagagagcgaattatctagaaactcagtgaggaggaaagagagcagggataactactgatagtagagcatgtatgtccttgatcgtcgagaaggtgaaggcagaattcatttataagtaaagaagattcatggtatagagaccagatatgttaggggatgatggccttttattttattcctggtagactcacttgaggaataaacgtggagcaccagtggcttgtgcttaaatatgtcttctgtatattttgctcagtagaggcttaattgggataatttctacttctaatgtataaaaaagccagtggttagcacaatttccagaaatattcacaatgtgttccataggaatgatttccccctagtctcatttttgagactagaaccctctggaattacacaatatgggaatcttgtgtgtaaaaagtgtagaagaattaagcttactggtaatatacatcttgatgtcaatcatttgattcattttcttactttaatgatattaacctgtgagatggatttttgattgatggaccagggtagtggctttcagagagaatgccaagaacaccagtgtcttgctccgtcttaactcccaattaaaaaaaaaaacttttaaaataaactttttattttagaatgggtagagattttcagaatagctgtgaagatagtacggagtttccatatactccacacccagcttcctctgttattagcatcttatattaatatggtacatttgccataattaatgaaccaatgttaatattattaactaaagtcaatactttctcttttctttctctttcttccttccttctttccttccttcctcttttatttccttccttccttcctttccttccttccttccttccttccttccttccttccttccttccttccttccttccctgcttcctttcccccctccttccctccctcccttcctcccttccttctttgacagagtctcacctctgttgcccaggctgcagtgcagtggtgccatcacagctcactgcaggcttaaccccccagactcaagtgatcctcccacctcaaccttctgagtagctaggactacaggtatgtgccaccatgtccaactgattttttgatacttttgtggagacagagtctcactatgttgtccaggctgatctccaactcctggcctcaagtgatcttcccaccttgacttcccaaagtgccgggattgcaggcatgagccactggacctggcctaaagttactctttattttacttctttttttttttttttttttaattctagggagctatgactgcaagggctaccatatgtttattgtaatactcaatggtttcctctatgtattgaagctactctattctgaatatggttcttaagccttcctaaccgtaaaaatcacattggagctttaaaaatgcatgttgctaggttcccccactgaagatcctgatttatttgggcaagggagtcgctgggcaagaacctacctttttttttttttaaaaaaacaaacacaggtgatgctaatacaatagtctctagactacatatattttgagaaaatagacctaaactataaagggaaattaagaaatccttagtaccacttagaagttgccatatctatttctgtgatgctaaaggaaaattttactgtaagttgttttttttggcatcaccccagagcataacacacaattagtatctaactcaatcatttctcttcttaaaagcactttgctgtccctcttggatgggcagggccactttccaatgtgctgcaatagcattttgttaaaaccaacatctcatgttaacacaactatttgtgggcttacacaacaagaatagatggagaaatatatcccgggaaggaaaatattattattaaagaaaaacctcaactgactagccacatttttatcctgtagggatagcagaattcacatcatggaaatttttatgttttcctttagaaaaactacttacggagccctttggttataaaacaaaaaggcccggacccatctagattagagaagaagaaagggagctaaactgatcttcatgatgaacttcaacggagtcattcctgaggatggagggaatgatctatgctggaaagggctatgtgagttttctttaaccaggctccagaaggaataggtttccaatccctggaacttagagaagccagtgcagaaatgggctgaagcaacgtgatgaaagagtgagatgctacagaagagacaaccagggagaggttccctggggcagagaatggtggatgagatttaggatcagtgttgccagattctgtctgttgcagattattgcctttttatcctagtcctttgtatacaatagccttgtgttagtgggtcatgttttaaagcacaagaacaaggcagattggacagacctaaagcagtataaggaggtagagtcagatggcccaaaatgatgaaagagaggattggagtaggagtcgggtctgggactcctcagaattataggtgagtgtgctggatatcctcattcatatgcatggcacttcgagttatttgatctggactcataatggcagacagacttaaggactcagggttatattaacaagaaataccctaaagattcttttgtcttcctgcagatctgaaagatgaatattgatagaaacttttgtaacaaaggcatatctctcctaccatttttcctctgattatgttgttctagttgtctgtgattcttattgtcagcacagtgctgaattttcaaatagactcttgcttatgaagctggcagtatttcattatttatgactttgttcaacttcatctagtctaaacacaaagtagatagaagttgtgtttttctattgctgacagcaaaattctcttgcgtgaacatatttctttacacagacaaaagatgttgagcaaggcatgatagtttttgcacagtacagctgaggaggatggatggaatgactgctgcaatataagaaactaagaaaaaattcagggcaaaagatcccaatctatataagctagtaaaactgggatataaacatgaaaattaaagagatacattttcctgtagcctttgtgccataaattatatgaaaagggtgaccaatagaagagagaaatttgttctttaatcctctgggaaatgctaaggagtcatttctttttttttttttttttttttttttttgagacggagtctcgctctgtcgcccaggctggagtgcagtggcgggatctcggcttactgcaacctccgcctcccgggttcacaccattctcctgcctcagcctcccgagtagctgggactacaggcgcccgccgccccgcccggctaattttttgtatttttcgtagagacgggggtttcaccgtgttagccaggatggtctcgacctcctgacttcgtgatcttcccgcctcggcctcccaaagtgctgggattacaggcgtgagccaccgcgcccggccccttagcaattttaaggtaacatattaataggttattgggattaggacatatacaccacagattgactatagatttcatgttccaattcattcatttttttcaccagagccactgaggaaatttttaatataagtcatgaaaaacgatggggcaaaattggaattgcatgattccttgcttccagtaaaaaaaaaaaaaaaaggttaaggattaagtaaaggactaatttaaattgggctccctactccaaccaattattcagattgtctcatttgatagcctcagggtgctgctgatactgaataatttgatccttgtctggaatcttttccttgacttcattattatacttgttcttatctacctcaggttgaaatatatgtgatggtcatggcaggtttcttgataaaagaatttggcttgttttttcaacccatcactagaaggtaccttttggagctatcaggtcatggggaaggctgttctggtaagacctgtccagacttagaaaaccatgacaattagcacccttagaagaggaaaatttggcttagaggcaggtaacagagactctctttagagaaagaaagggttattaaataatctagtgcaacacaatctaatagaagtacaaaataagccacatacataatttaatttatctaaaagccacatgaaacacagtttaaaaagcagatgaaataaatgtttatagtatatccaaagtatcatcatttcaacatgtaatcaacataacaaattattgttaagacacgttttaagttctttttctatacactatgatttaggatctggtgcatacttcatatgtacagcacacctcaattcagtctagccacatttcacttgtgctacagccacaagtggctgctagcatctactacattggttagagcctagtagaagcttattgtacttaatggacatctttagataaccttgtttattgagtccttcacagcattctctactcttatccacatcagttctaaagcttgacgccccttagatgagatagtggccacaactgtctgcctcaacaccaatgtactacttccttttctcttggcaatatccactagagaagcaagaaaaagtagcactcacctccccattcttctttgcagctaggggtggccatgtgacacaattgtggtcaatgagtggtcagcaaaattatgatcaagggtttctggtagctggtgcctccccttccttcttctgggtgttctgaatgtgaggcctggaactgtagaatcccgaataatctcaaagacacatgggctgacaccatgaaataattgaaccaacgctaacattcaccaacctccacatttctttctacaaaaatcactgggcacagtggcccacacctgtaatcccagcacttaagggaggcaagccaggagttcaagatgagcttgggcaacaaattgagaccctgttgctaaaataaataaataaataaataaataaagttagctgggcatggtggtgtgagcctatagagtaggctacttgggaggatcacctgagcccaggatttcaagcctgtgatagtgccactgcactccagcctgggtgacagagcaagaccttaactttaaaataataatacactgggcacggtggctcacaccagcactttgggaggctgaggaaggcagatcacttgaggtcaggagttcgagaccagcctggccaacatggtgaaaccctgtctctactaaaaacacacaaagtagccagtgtggtggcgtgcatctgcagtcccagctactcaggaggcagagacatgagaatcacttgaacctgggagacggaggctgcagtgagctgagatggtgccactacactccagcctgggtgacaaagccagactcatcttgaaaatagtaataatagtaataataataataatgaagaaaacaccataaaaaccttaattatttaagccattgttcgtggatttctctttgacttgcattttatttcacctctaagtgatgcaaaactttctggagcctgctctgaacagactacactcctcgtttgccctctggcttcctgctagctctgacaatggggcactacagggagacaagaaagtaggaggaaggagaaaagactcccattttccttttttgttccaatcagggttgtcctgaaatacctagggggatttctaattccttactggactctgactgatacatcccctgcggcctcttctctacatggaatttagaaagatagttttaggctaggcgcagtggctcacgcctgtaatcccaacacgttgggaggccgaggcaggtggatcacctgaggtcaggtgttcgagaccagcctagccaacaggtgaaaccccgtttttactaaaaatacaaaaattagccgagtatggtggcatgcgcctgtagtcctagctacttaggaggctgaggcagaactgcttgagcccaggaggcagaggttgcagtgagacgagactgcattactgcacttcagcctggatgacagagtgagactccatctcaaaaaaaaaaaaaaaaaaaaaaaaacaaaagatagttttaaagcataattcagttcatatatacagtggcttctgatatcaataaaaatgaaacccaaagtttcttctacagccagtgagatgttatttctttgatcctttctcctacctctgctctgacacaactgtcagaggcatttgaactagagtgactccatccggaacaggggctgggtaaaataaggatgaggactgctgggctgtatttccaggaagctaggcagtcttagtcacaggatgagacagtaggtcggtacaagatataggtcacaaaaccacctcctgataaagcaatgtggtaaagaagtgggccaaaacccaccaaaaccaacatggtgatgacagagacctgtgggcatcctcactgttcattagacactaattgtagtacattaaaatgctaaaagacactcccaccagtaccagttttaccagtacagtttacaaatgtcatggaaaggtccagaagttaccctatatggtctaaaaaggaaagcaaccctcagttttgggaactcctcaaccctttcctggaaatctcatgaataatccactcactgtttagcatatgattaaaaataaccataaaaatagccaaccaatattccttggggctgctctgcatatacagtagccattcttttatttcttcacttctctaataaacactcacttttctctgtggactcaccattaattttcttgcacaagatccaagaactctctcttggggtctgaattgggactcctttctggtaacacaatcacccagagttccttcctcttccaaatcaaaccaacccaacatactgtcaccctagggactctgcctgtaatagtccttccggatggatcctcactttgctccaaccctccgttggttcagccctctgctcaaataccacctcattagcaagggcttccctcaccacccctataaaacacagttccctgtccctctcaatccactcacctgctccttgtttttccctagtagtttccccacatgatgttttgaaactgccattgcaaaattataaccgagaaaattattacagtgaaagagagctgacctaaccaactttgtcttgcttctaaactcctagctgtcgttgttcactcatgggtgtaggccaaattaactttgggaggaacttagtttatagtttaactttgaaacaaagatgataacagccctttcccaaaacaatcccctttccttcctggggactagactgcttttgcaggactaacaaaattggccaaatgatgagaaattatggtttaggagtcatgcagttggaggttacaagattctgaccctccccaaattgctcctggggataacatcactattgtaaaacctaagatcagtgcttgagatattttgcaaaccctgcacttgatggatcaatatactggctcatctggtcttgtggccccacctaggaactgactcagcgcaagaggacagcttcaactccctattatttcatctctgacccaagcaatcagcactctcaactcactggctcctacctaccaaattatccttaaaaactccaatccccaacgaatttttggggagactgatttgagtaataataaaactcccacacagccagctctgcatgaatgactctttctcttttgcaattcccctgccttgataaattggctctgtctaggcagcgggcaaggtgaacccactggtcagttacagttttacatgcttgtttacccatatattattcatctctcccaactagaataaaactccaaaagggtaggaactttgactattgcattcattgccttatccccattgcctggaacagtttctgagacaggactcatgggaaaaggatcagtaggaaatggaaagagatggtatcagtttcaagtatgatgattttcgagttgccccttgaatattcctgtggacatacccagttgacagagacacttgagtctggagctaatggaagacatatagttagttgaattagatttgattaaagctataggtttagatgagaacatccaggaatggttcatagaaagagaggagagtcatgataaaattgcacaagacataatatcaaagagagagattgatacaatgatagaggtaggaggcagagaaattccaggcagacagggacgggtccctgacaaaactccaccttcaagccgaaaagcctgaaacccatggcccaaagtgagaacttctatccattttcctgcttaaatgttgccttttcctaaactacccatgacccaccccaccccccatcctgtgcctataaagaccccagactcagtcagagagaagtgacttgacttcagagggatggcttgatggcttgacttcagagaagactggccagagatggctggacttaaggggaagattacttgcccatcccatcccctttccaggtccccttcccctgagagccattttcactgttcaataaaatcctctgcattcaccatcattcaactcgttcacacaacctcatttttcctggaagccagacaagaccttgagagctatgagtgcagacaaccaaaaaagggctgtcacactggccctttgccgttggtggtggagggcagccgcctcatgtgatgaggcaaagggcccactgaactgttaacacttaagccgaacgtggctggcagagctgaaatagcactgtaacatgtcctcttgggcttcaggggtcttaggtagccccacttggatgctgccatggggcctgcatagagtttgctcctgctggcacccaaaagcagctggccagatcccgtatttgcttgcctacttgcttcctcccacaaggggttgagtgtggcaagctgagtaaatggagtttatttctgccagcactcaaaagtgctccctctggttcctgcacttgttcactcatattttgcctcctgtgagaggtagaaaggggtgggctgagtaaacaacgcacccctgtcttgaattccacaaaggagtcaagaaaatatcctgcttcaataccaggggggctatgcagcgatgttatgaatgaccatcagattagagagaagtggtgctgcagaagtcccgagaggagaaattgtccaggggaaggtgactcaatgccacagagaagacaggtgagatcaggactaaacttgcccttttggtttggtaagcagggaatgtaagccaaaaataaaattctaagcccttccagctgagtgacggacccctccctgccccccatctctgccaagggcattccaaagaattatgaaaaactagtacaggccgtgatgggaaggaagggtctgacacgcctcattataccctcctccctttggaattcaggtatgactaaccagcactaaccttaaaacagcaatcttaggactgacaaaataaactccttgtagcaataagataccaacatgacagataacaggccctgaaagaaatcaaagtattttacctgaaaacatatttctttgacatattttgaaatggcccggcaaaactgtatcttaggggaaaatctacattctgtagagaatcactttccttttccaggtcttttccctcatccaggagataattaactaagagtctggcacctttttaagtgtgataagaaacatttacagtctattctctgaaacctgctacctggaggcttcacctgcataataagaaccttggcctccacatccccttgtcttaacccggacactcccttctgattccaggtctttacataccacctttactctttcaaacaattgtcaatcaaaaatctttgaattcacctatgaccggaagcctccctcttcacccctctacccctgcaacatacaccttacatgtattgactgatgtcttacgtctccctaaaatgtatgaagccaagctgcagactgactccctcgggcacgtattcttaggacctggggccgtggtcactcatgtttggctcagaataaatctcttcaaatattttaacagagtttgactcttttcctcgacaggaagctttgtcaatgctggtgagggccattgtgtaatgatgaattgagagttttgtggaaagccagattaccatggattgaagagtaaacgagatgggagagtgtgggtttatcttttgtaaagagtgtctgaaaggaggaaagacatttcctaactacaagacagattaggtcaaaagcaaattgtcttttttttggtttgtttttttaagaggaaagatagttggatgttccacacagcactggaaatgagtgactgttgctgaggacacaggccaaggccgacttggaaggcctctgtactctatgtgggcaccatttccagactcgctgttgtgcaaatctgggttcatagaggtgccttgctgagtctctggtactgtcttttcagtaagtcctcttttgagacatgaattgaaagcaccatagaaacaatggaccctcccactctgctctgaagcaggcctagcccctgactccctacgttgctgggtggaagccagtcctctctccaattttgcagatttgctatctaaagaatttgcaggccaggcgcagtggctcacgcctgtaatcccagcactttgggaggctgagggaggtggatcatgaggtctggaaatcgagaccatcctggccaacacggtgaaaccctgtctctactaaaaatacaaaaaattagccaggtatggtggcaggtgcctgtagtccaagctactcgggaggctgaggcaggagaatggcatgaacccgggaggcggagcttgcagtgagccgagatagtaccactgcacttcagcctgggtgacagagcgagactccgtctcaaaaaaaaaaaaaaaaaaaaaaaaaagaatttgcaaaaccttacacgttcctctttttatgtgtttcctgcaagctgcaggtcacatattggaagaagatccttggaacagagggattggtatagccctgagcttcccaaggtaaacacacaagccaagtcctagcagcaccaggttagggtaaataaaaaatttgaaaggagcaaacttgcttttgttttaaaatatcatagtttaatgagaaatttgagccttggtgactgtcttaacccttttttttgtgaatattgacgataggccttgatccatagtatgccacgggtacatgatcctttcacaaatctatggtggtgaaaaatgtctctttataatgtgttgtgtactggtaatctgaggctggaagagttgtggatgtggtaaaaatcagtctttgtggttggcccacattttttttctttggcctctggcaactgcaccctgtgtgtgtgggcataagaacagtatggatccatcaccttactggcttgtcagcaattacataagacagctccactttcactgagagtaacaataataatttcttctgaggacttttctggaaatgaaaacactttaagcaaaaagcagtgatctaatttggaagcaatacctagcagaaagtgtattcgtttcctagggctgccgtaaaaaaaaaagaccacaaactgtgtggcttcacacaacagaaatgtattctttcccagttacagaggccagaagtccaaaatcaaggtgttgacaaggttggttcattctggaggctctgagggagaatctcttccatgcctctctcccagctcctggtgagtgccagcagttcttggtgctccttggcttgctgatgcctgactccaaatctctatctccatcatgtggcattctgtctggatgtctctgtgtccctgtcttcacagggccttcacatgacaccagtcattggaactagtgtgcattccaatccagtacgacctcatcttaacttggttacatctgcaaagaccctgttttcaaataaattcacatgtacttgaactgggggttagggcttcaacatatctttctgcgggaacacaactcaatcaagaacaggaggctattgagaaataggtatttagaagagctcagtaagaatccacatttagcatacaaggaaggaacatggtatgctgagtagtgaattataacttttatgtattcaagctttggtaaaagctggaatccctctggggaaattaagaaaaaaaatcccactttgatagaggctgaaattcttggtagtggaaagcagatgagcccactctgtctagcacatatagcagtttccctctctttaaattggataagtctggcctggaaactagaaatctcggttgacagccataaaccacttagaagtagtcagaattacagtcatttgcaatataccataccctataagaagagcatctccttaatcataatatccaactctcagactatccttttatagacattgaggctacaaaggcattttcttgatggattccatggtcccgggaacttctcagaatctgcatggcttattctgggaaatttgccagacctcagccttttaaatttgtgtaacttacatgatgaatagtgtattgtgtaggaaagcctatcaaaataaaccaaatatttcttctttccttatgattagaaaacctgtagtttgtctctccgagttaggcattacattatgtttcctctgggttcatttcattttataatttaaaaaaactatagtgtattattgtctatctgtgccattattttccttgagtttaaagatgtcacatcaaacagaactcttttttgaactgaatctctattactggggacctgcacgttttgaagctggctaggactaaacattttcttcataccagctgtcacaaataattcagtctgctaaattctaatacactggcagaatgggtgagcagtcccttgaaaagagaattttaaatatcagtctcttctctcttatatcagtgttcagaaattccagtgaaaacatttggggaagcagacagaattagtaataatggaattagagtgctttccacatgcccattttgtgttgatctgcatttaggtggaggttagaactcagtccctaagtcttgaaagtttgatggcatgcagagcaatgtactgagactatgggtcccagtcctcaggaatcttattgcctcacccctcaagaagaaaccaatggtactagtaacgacaaaatgctggagactgtattagtttctttttgctgctgtaacaacacaaaattattatcttatagttctgggggtgagaaatctgatgtgatctcggctaaaaattaaggtattggtatgactggattcattctggagtgctctataggattatatgtttgctttactcttccagcttctagaggcgtcacattacttgactcatggacccctctcaactttacaaccagcaatggttggccaagtctttctcatgttgcgtcactctgacagtgacttatgcctccctcttccacatttaaggacccttgtgattacatgggccacccaagtaatccaggatgatggatccagccaattggcagttttaattccatctgtaatcttaattctcacttgctacatagcctaacatagtcacaggttctggggattacgatgtggacatcttgggaggttgttcttccatctaccacagaagagagtaaatatatcccagaggtcagtcacgtgtcctcttctgatcagaaaggtaggaggcttagttctgaactgtgctgctctgtaagtgtattttactgagtcattctggcactgggtgcagtgagagacaatgcaaattgcaaaccgtatccaatttctgcctcattactgttaccaaaatgccaggggcctgctgctcaccacacagaaagctgatcactgagacaatgagtattatcagggaagaaggctttcattgcgtactgctgccaaggagatgggatgcaagtctcaaattgggggttcatatagcagggaagtaatgtagccacatatattgtgttagtttactctcacattgctataaagaactacccagccagacatggtggctcacacctgtaatcccagcactttgggacgtcaaggcaggtggatcatttgaggtcaggagtttgagttagcctggccaacatggtgaaactccatctctattaaaaatacaaaaatcaacctggtgtggtggtgggcacctgtagtcagtcccaactacttaggcaactgaggcagaagaattgcttgaacccaggagatggaggttgcagtcagccgagatcatgccactgcactccaggctgggcaacagactgagactctgtctcaaaaataaataagtaaataaataaaataagaactacctgagactgggtaatttataaagaaaagagactcaattggctcacaattccacaggctgtacaggaagcatgttggggaagccccaggaaacttacaatcatggcagaagggtcaaggggaagcaagcacgtcttcacatggcatcaggagagaaagggcaaagggggagctcctacgcactttcaaataaccagatctcatgagaactctatcatgagaacagcaagggggaagtccacccccatgatgcaatcatctcccaccagctcccttccccaacattgggaattacaattcaacatgagatttgggtggggacacagagccaaaccataacatacaggaaatcaggaattagggggatgtaaggaagaggagttgtctaaatgcagtgatctggtgagtttcagtttcttgatactatctgggacgtctggtggtcagtttcctgggaaagatactcaaattagacaaatgtaagtttcaagttttaagaccaggagagtcagtttctatgtttactcaaaaagatcacaaacatcagttctacaaggaaattagccagtttcattatttcctccattaccccctaaacctgagcatgaaattgtcatcttttccagtagctgggaaaagctaaagatcttgattttaaatggcaaatctaaagatcttaagaagggcatcaagcagatgcccttcccactcttccatcaaggaaaagtgtctgcttccttgttcatagatgatgccttcttgttgtgtgctcacatggtagaagggcaaggggcctctctcaggccccttttataagggcactaatcccattcctgagggctccacccctctgacctaatcacttcccaaataacttcccaccttgtaataccgtcaccttagtggttagaatttcaacatatgaatttgtaggagacacgaacattcacagcatagtagatacgcaccacatcgatgcaagatattaacagcaggggaaatgcatgcagaaggacaggggatataggaacttgctgtattttcagctcaatatctctataaacctaaaacagctctaaaatataaactctatttaaaaaacaaaaatgctgtctagccagtgtcttttagggtccagatgtgggggccatttacattttggactgcgtagcataaaggaaaattatgtaaagcatgaactgtgtaagctctgacaacatgtccttgtgggcaggagcagactgcaatttctgaggcatataaaacacggggtcctctgcaggaaaagaataaatacaaaatgaagtaggaaataaaatacttatttggaagaggctttgcaagtgagggatcctgacacttaagtttcattaactttatgacatctatcttggcttgtgcgtgctgacacagagaaagtaggggttctgagggaggacagaatgccataaacacagagagagaggcaaagccgagagacccagagaaagggagagaaatcatttgagggccttcctttctacttttttgttgcaggttttattttcttgtgaagccgaaatttgctacccatgagtattaccaacaacgtgcccctgttagcttaaactaatgtgttggaaccaaatacccagcagacgcaatatcccttatgaggaggggaggggcagttggaagtggttccattttgtaagtggcaccactgaggcagaaagccaagcagtaacctgctcaagaaaggcagtatagtatggatggttcaaacagagcctacttctttgattttcagtccaatggtctcttcattgtctttggaggggagttaacacctcctgagaaagccagtgcattacgatctcattacttattctctgcccacatgactggttctgaggttccttgaaattcaattctgtctccgttggagactgagaaataatgaactgaggataaaccagggtaggtgtcatcacaagatgacatttttgacagtatgtccagaggccgctgttcattacagttgcttgttgagacctcctcctgccttccactggagtgatgtgcagtgagggtatttctgtaacttttcctccaggaagtttcctttccactttgatgtaacagaggaaacagacagtcttaatttaagctgaattcaactgtaggctccttaagccctagagttaggatacaactggacaatgtggcaaaagacataacacataccgcagatttgttagaaagaatgcatgcggcaagcgttggccaattattccggtgtcacctggggtggcatgttattttatgctgtggcgctattgctagtgatggccgctgtgtatttgctctccaaatccatggagatagttcaatgcctttttactgtgtacacttggcagctgctaactgcagacataagaacagaatctctgagggtagatggagaagcaagttatgtgaccatttttctgtgttctcaatgccctcactatacgtaaaagtaaagaatacaatttcacactctctctctttttaagcaattataagatgtccaggtcagtgctgagagatttccaaacactagcacaaaaagttcctgaaagtggtcttggataggaggaatgattactctctccactgaggcaggtggagaagtggcagacacagaattcaaacctaggtctccccgactgcagtgatctgttgcccacccactgttcaaccttccattatagtactcaccgaatgccttcccagatggggtcctcaagtccctgcaccatgtgtcatctttgtatctataatatctagctcagttcttcttactttctgacacagcgcctcactctgttgctcaggctggagtgcagtgacaccacataactcactgcagtcttgatttctcgggttcaagctatcctcccctgtcagcctcccaagtagctggaatgacaggtgtgagccaccatgtctagcctcaacgcttcttaaaggaagtgagtgaatgaatgagttgtagccccagctttgatcgagttgctcagaatgtcataaaaaaggtggccatgtggatgttttggtgtcctttttccagggggatttcttcctgtgctggaggttctctcttgaaagttaatgggtctcagcacagtgcctgaagtgatttgtgggttggatcctcttaggcaagagcccatctgtgggaatcaatgtttggcttatccagtagacaaattagtctgacatcactatccctttgagggacaggctgttgtctccttgtcaagagtggatcatttgctgtttagttttccttcggtacagaagggcttgggtttgggggtgagtgattcagcacttggttaatcagctattctgcatggcatcaatgtttttgaatttttgaaataagtcttgtggattcctctccactcctcttctgtttagcaccacctacaccttggtaactctgtctgctgacactcgttctccttcagtttctcccccacattccctttctgctgcctgatgaatctctggggaaaaactacctctcaaggttttcctgtcaaatgttccctggtaatgagaacagagctgagtttttgggtcgttgctatggagaaagtgtgttttctcattgccctattatatttgagtatgttcccagtctgaaatctgtgggtgacactgcatttgcaccccctttttaggtctattgtatctcaattatataagcctcagtgtgcttttttttgttttatttttaacagtttttatgttccccttttaccacccagtataacaggtggcctcacgtcagtggttgaggttgaagaccatgaacctaatatctctcctgcattatattgcatgcattctgctgctcttcatgcagaaagaaaacattcaatttttagattcatgtgaacactacagaaataactaatatgtgatgaacactggctccttccatacttctcacatctattggctattcctgtgcttctaactagtttttatttaacaacattgaatgcttaggcactgatagattctagagctttacctttctttcttcctttttttttttttttttatagctgaaacctttcttctatggaaatggtatgaaaacccgacagggaaaacaaataaccgaggtgagagaaaggggctcagagctcaccactgctcttgttccttgcaggggtccgtcaggttcatccacagaacatcttgggctggcagagttcagatggaaacccactctacaagttgccacaaaaatgaacagactacacggattttgggagcttacagctgaacggggaaaatgttatgtgatcaacacgcaactcatagtcaaacaatgtcctaattgctttaagagcagtaaggtagaccctgagtgtcagacagtatggtagataggacagtgggcattggagatctggtcagaatcctgattcttcaactctctctgagcaaatcaacttgaacaacttgaacttctttgaatctgtttctgacttgtaaaatgaagataatgtgacctacttaactttttccagatttgttgacaggatcaggcatacgattgagtgcaaagtacttaatccagtgtctggcttattgtcaaagagagtattgataaagacattcctcacaagaataatagctaccaccattgattgctttctatgtagtagtcacagcactagacagaactaggagtcttgcctcagtcatctcagtgtcttctctaagcctcttcatgagaaatcttacaaatcaggtcattaaaatacaggcttaatatcttattcatgtatttattcattcatacaacaaatatttactgagcagctcttaaatgctaggcactggtctagtcttgggggacactacagagatctctgccctcatagattagatgttgctttttttttttttttttttttttgagattcagccaggctggaatgcagtggcgtgatctcggttcactgcaacctgcacctcctgggttcaaacaattctcctgcctcagcctcccgagtagaagagattacagacacccaccagcaaacgcctggctaatatttatatttttagtagaggaaggggtttcaccatgttggccaggctggtctcgaactcctgacctcaggtgatccgcctgcatcggcctcccaacatgttgggattacaggcatgagtcaccgtgtctggccagatattgcattttaatggagtaaacagactataaaacagttgtattacttggatggtggttcaaacagaaggaaatctctgagatgaccctcaggttttaatcttgatgtttttacctgataatcaagatctggctttgctcaaggaatctactccatatttaccctctgagttctgagatgattcttttctcctggagttcataatcatgtcacaaatgccacatttatcaatacatgtgatttaaggtcccatatcatctctttgaaaaaaacttgcttggagattctgtgcttgttcatgcttcccaattcagtccatgcatccaatccaattttaaatgtcttctcttctgggaaactgtcctaagtcctttaggtctcccctgatcctagtacagacttatgtctgtcatagcagtaagccttcaatatcccaattcgttgtttatgtatctccctccttactgttctctgtgtttcttgaaggcaaggaccgtcttttatttattccctttgtatccccagaatctagcacatatagcactccatttttttaagctgatgatgaagaaaaagaccaataaaagatctgtagaaatactatatgcgtatttacacaaatgtctatacttagggggaaagtacagctgaatctttcaatatgttttaccacctgctctgtagatgctgtagattggtggctataacttgtgggtctctgtggttggtgaaggtggtggtcaacttggtatttctaaacaggtctttgtttgcatttatctatctgcatttgcttaccgcgagctatgatatttagaaatgtgcttctaatactgttatctcaaagttcttgctctggaatgtaagcatcttgatttagatacagagaatgataggcaatgaaacctgcctgaaacgaattagctaattggtttcagttctcctaaagaatgaattttcatctctgtcctgtcttctttcttcagatcagttcaggacctttctgatgtgatttatcataacagaactgtaatttacatcaaccatctgaatgtccctatgtaagtggatcggggattacttttacttgcttcttgcgtgactcaattttggagaacactcaactgtttactgtcagaatctgttctcgaatgagacagatgtaatatgaaaagttaacagtggcctgtgtctctatgatgtttgctccctcaatctgttatgcattgttttctcaaaagtcattttctaactcccgtgaatgtgattcattgatgatctctgcttcagactataaagagggcttagaaagaagtaaacactcaagagtttaactggcttagtgtttggagttgcccttactgggctcaaaggatgccacttgcctgtaataaccagccaccccaagtcagagccagatggaggtgtgggactacaggcagaatattaagtttggcacctttccaaacaaaagttctttaaatattttccagcataggtaaagaggagaggctaagagctgtgttggagcaggaaaaggaaggaggacatgggggttgtgctcagtttctttgctattgctccaagaaactcagctttggccccagcttttgtaacccacatagctaaacaaactgagcaggttaccacatcttcttcttgggccttgtctcatctctcaccctagcagcagcttctcaaagtattcttccccatcacatggagtatcttctgagatgtgcacaaagtacccctttctccatctagtccatgtctagtgaagttttttttttctaatcatgtattagtgtctcttacagactgaaacctgggacagaggcctcatgccccttgtcagtcttgctccagataaaaatctcatttatgtgacacactttatcctttaattcttcaagcctgtactttgcacatcaagcttctacaagagtagttggtgcttttgtcctgaagtcaaattctatgctttgttctcaagtgggtcatggaccccatcactaaagcacagaagagaaaccgctgcctcctttcggcctatctatattccgctgggctataggcctcacatcttcaccatgcagtatagtcctcatgaccttacagccacacaccctagccccactgctctgaaatccttggaccagccatatgtgccatgcaacattaccttgcctgcactctggcttgtcaccttttcaaacagcagaggagcctttgcttaccccacctgtggggctggtttttcctgtagctgagcaggaccttcatagccagttagtatctgcttctcagatggggaaggtttactaaaagcactcaacagaggccactttcctgacagctgactgcatcccccatgggctaaaccatctaaatctccttcggcaccaacccatttgctttacacctttaagatctcatactatgctcaatttctcaccatcatgcctgagactccgaagattaattccaccaagtctatgttaactgtcctctagtttttctgatgctctgtttgtttccttcacagaacttcacatgttgtaattattttcctgttcctttgcctgttaatttctttgccccttgatacagtttggctcttgtgtccccatccaaatctcatctcaaattgtaatccccacatgtccagggagggacttggtaagaggtgattggatcataggagtggtttcccccatgctgttctcctgatagtgagtgagttttcataagatctgatggcttaaaagtggcacttcccccttccctctctctctctctcctgctgccatgtaagacatgccttgcttccctttcatcttccaccatgattgtaagtttcctgaggcttccccagccatgcagaactgtgagtcaattaaacctcttttccttataaattacccggtcttgggtagtttattatagcagtgtggaaatggactaatacagaaaattgataccaggatagtggagtactgctataaagataacctggaagtgtgaaagtgactttgcaactgggtaacaggcagaagttgaaacagtttggtgagcttggaagaagacaggaaaatgtgggaaagttttaaatttcctggagacttgttaattggctttgaccaaaatgcagatagtgatatatggacgatgaagtccaggctgaagtggtcctagatggagatgaagaacttattgggaactggagtaaaggtgactcttgctatgctttagcaaagagactggtggcattttgcccctgccctagagatctgtggaactttgaacttgagatgatttagcgtacctggtggaagaaatttctaagcagcaaagcattcaagaggcgatctggctttttctaaaagcatacagtcagtcgtatgcattcacaaatagatggtttgaaattggaagttaggtttaaaagggaagcagagcatacaggtttggaaaatttgcagcctgaccatgaggttgaaaagaaaaacccattttctggggaaggattcaagtccaagccagctgcagaaatttgccaatcaccaagacaatggggaaaatatctctgaggaatttcagagatcttcagagcagcccctcctattacaggcccagaggcctaggagggaaaaatggtttaatgggccaggtgcagggtcccgctgctctgtgcagccttgggactaggtgccctgcatcccagctgctccagttccagctatagctaaaaggggccaaggtacagctcaggcagtggcttaagaggatgcaagcttccagccttggcaacttccacgtggtgctgggcctgcaggtgcagagaagacaagagttgagctttggaaacctccacttagatttcagaggatatatggaaatgcctggatatttaggcagaactctgttgcaggggaagagtcctcatggagaacttctactagggcaatgcagagggaaaatgtggggttggagcccccacatagagtccccactggggcactgcctagtggagccgtgagaagaggaccaccgtcctccagaccccagaatggtaaatccactgacagcttgcactgtgcacctggaaaagccacaggcactcaatgccagcctgtgaaagcagctgtgggggtggaaccctgcaaagccacaggggtggagctgcccaaggccatgggagcccacctcttgcatcagcatgccctgaatgtgcgacatggagtcaaagaatattactttggaactttaagatttaatgagtgccctgtcaggttttggacttgcatggggcctgtggcccctttgattttggcaatttctcccatttggaatgggaacatctgcacaatgcctgtacccccattgtgtcttggaaataactaacttgtttttgattttataggcttatgagtagaaaggacttgccttgtctcagatgagagtttggacctagacagttgagttaatgctggagtgagttacgactttggaggactgttgggaaggcatgattcattttgaaatgtgaaaagaacatgagatttgggaagggccagaggcggaataataaagtttggctctgtatccccacccaaatctcatctctaattgtaatccccaagtgtcaagggaaggacctggtgggagatgattggatcatggaggtggttcccccatgctgttctcatcatagtgagtgagttgagatctgatggttttaaaagtggcagtttcccctgcaccgtctctctctcctgccaccatgtaagacatgccttgcttccccttcaccttctgccatgattgtaagttttctgaggcgcctccccagccatgcagcactgtgagtcaattaagcctcttccctttataaattacccagtctcgcgcagttcattacagccgggtgaaaataaactaatacatccctggtaaactctaagcttatcaaaagctgacaatgtctaatggttcactatgatacccttgagcaactagcgtagtgcctgcactcattggccttcaattattgttgaattaatgaatgaattttgcaccctcattttagatggaatgggatgctctaggagaatttgttcttgatttcatggccatatgtagaaagccttgttctagaggcagatggacatacataataattaaacaagccaatgtttacatttgtgtaaaatgcctattatcttgtagttgaatcatttccaatttttcctagtataattttctaatgtgctaaatttagtatttgtaaatgaagttttgagttgccttaatattctctcttcttcttttcttaaataattcatgacctgaagtaccctaaccttttattttctctacttgttctttcctactgtaattttttaaaatctcaggcaacctgagaggcagctgaattcttttgtcatgttgtatcatgtcagcattaccacacaagtttctccagaggctgtcttgtaattacacttgattggctgattattcctgaaaggcaaaataaattttacagctgtctaggtaaactttaaaaacatcctccaaaatgtgatatgtgtgaggcctgccttgggatcatgactttcgatggaactaaaccaatggtcaatgacccatcatggtataggcaagttcaccatcatcaagaaatcagtcttttttgtcctgtgccttcaatctgatatttctctctactagagagcaagaacatctagtcccaaagcctatagagaatgttagtggttgcctagcaacatcatttccagcacaagtttgtggctttctaagcaagggaagggggtaaccttcctgtctttctcagctccctgtgagtctcttgtatttttttctactatgttgacctctggctgattgaaaacatataagatgatgtgtggaaaaactctttcagatagttaagtgtgaatacaagatgggattatcacctctcatgaaagcccattctagtccccgattctttagcgcagtgtctttgcagtcagaatatgaatcgctcgttgccaatttttggtatattctgatgcgagcagaactgcaaatgttggccccgacaagcaaattaaccacctcctaaattattttgttttttcttctggagataagtggcctgttttgtggtctgttctgttggtcccctgtctctcattccccaagcactgcaaggttgatttttaagaatatgtattggtgattgctgctatttccaagtgagtttgatttacctactttgtttattttaggtatcatgcactttctatttgttgagcctccttaactatttctccttatgtttcacgtcttcaaaacttttgtgtcatgcatctgccaagccaaaatcaggagttcaataaagtcacttgagaattataaaaacatttagttgttgggagataaatctctataggtctcaaacatttctgcatgtcttgtgaacagagctgcctttgttctgggatatcttttcaaggatgcttgcacagccaacagtcttggaagatagagatactgtctccctccagagcaaagggaagatttgcttagcctggaaagataatgatagtatgtccttctggagcaaagaaggaacttagctcatggttcattataaaatatgtaggttccctgcacttgagtccctctcctttagcacacttaatttcttaggtctctctttatatttcaccatgggaattggggcttggagaactggtgcaaatgctaatactctattgctgaagctgtcagtaataaagacttttgcctctgactcaggagtctcgtgtcttctgcctgcatctgtgaaattgtggccagacaacttattgtcttgaaagtatggtaaaatatcagacccttcatagttctagtcaagttcttagtagcttaatgctcactagttcagtaaatatatgtgttggaacatatttaaaattggtcttaagatacatttcttttaaggaacattttagaaattttagagacctgaaattctacatgactttctaccaagagaggatcaacttttgggttgaaagaactgaaaatgcaatgatgatcattgcattttactaatcaaaacttattttcaatcttcattttcaataaaattaagttaaaatttcttagctggcataacaaagatagtatggatttggcttaccttacctttctacatatgcccaaagctccggaaaactcaaatgttggaagtaactgatctatatttcactagacttttgttttctggtatttctctcagtgggtggtactgtaatttagcagccatccaaaataaaacctgaaagcccattactcttccctgttcttcattaatccacatccaatcattagtgtgttaaagatctctgttttcaaatattgcatgtgcagagactaaaaagtgcactgtataaaatagagagtatattggtagttaccagaagccgggaaaggtagggggaagggggagatgaagattgattgattcatgggtacaaatatacaattagatagaagaaataacacctggtatttgatagatcagtggggtgactacggttaacgttaatcaattgtacatttcaaattagcaagaagagagtaattcaaatgttcttagcattaaaaaatgataaatattcaaagtgatggatatctcaattaccttgatttgattatatgaatgtatcaaattatcacatgtaccctgaagatatttacatttattatgtgttaataaaacaactctagtcttttaaatatgtcccctattttccacgcttagtatcagaactctctactttttgcttgtttgaatcattgcattagctttctaactggcttctttaattcctatttgtatatttaaaatctgtcttcccaactgggctcagaccagtgtgatacatccaaaatacaaaactgatgctgtttaaagtgtgctagcagcccccctttttacacagaataaagtccatgcatttcaggatggcctccatgaactggcccatctatatctctttggcctcatgtttattttatgatctgtgggatacgtatggctagtgaccgagagcaagggctctggagtcaaagcatctgtttatattatggttttttcatctatgagctgagtgaccccaggaagatttaaatagtattccatggcttagtttcctcatatgtcaggtgggaatacaaagagcagctactcatagggttgttggaagaatttaaaaaataatttgtataaaaacacacattggtccattttgtgctgctatcatagaatactacagactgaataatttttaaacagtttaagtttatttggctcacggttctggaggctgggaaggccaagactgagggtctgcatctggtgagaaccttcttgctgcatcataacatggtagaaggcatcacatggtgagagaatgcaagaataagaaaaagtgaagggtgctgaactcaccttttataaagacaccactcccttgataatgaacccactcctgcaatgacaacattaatccattcatgaggatggaaccctcatgacctaaacacctctcattaggttctgcctcccaacactgctgcattggagattacgttttcaacacatgaactttggggaacacattcagaccatagaataacatttagtgaagtgtcaggcacataacagatattctacaatgtcagttatattaatattaaactgcttgttttcatcatgtgccatgtttttctattctttgtcttgctgtcttttgttttcctttgtgtaaaatgttcttgctctgcttcactatggaacagtggttgacagcatgggctttgggtgagattaaaacaggtttggattcagacacttccatggattaactgtgcaacattacaaagagtgctcaagaagtgattattattatcctatgtacccttcaggattcagctcaggggaaatcatctctgtgccagttatgaggctattaccttttggcatcaaatctatccttccatagttggcattttgatgctggggccaggattctgcaacctgcatttttactttgcctgcaggctccgtgttaggctccctctacttgggaaggaagacagaagcagcagggctgagggaggaagaagggacttccacctcctgtttgtgtcctgtgtgcctcctgcctgctgcctgttcctactaggctgttagttcttgttttatcttttcaaaagacagagatgagggtgaggtcaatgaagcatctgcctcaggaacaaaatttaagggaacactaatactaaggaatcaggataaattactgtatattcaaatataatattttaaaaaatcaaaattaaatgaaaaaaaacccataatgaacaaaatatcaaaattttagtagagaccagtgcccgctgagccacattagagcctggggccactggttttaataaaaacaaactcatcaataatatattcaaaatctactttgttgctaatttcatttttagttgagagaattactgtgtttgacaatttctcttgtccaagagatgatctttaataatttttacttagcttaagctgatacagagtgataacaaattagcttttggcataagtaaaatattaaacttaaaataacactgtgggctgggagtagtgggagtagtggcttatgcctgtaatcctagctctttgggaggctgaggcgggtagatcacttgagcccaggggttgaggccaggctgggcaacatagccaaaccttgtctgtacaaaaaaataccaaattagctgggtgtggtggcacatgtctgtagtcccagcgactcaggatgctgaggtgggagaattgcttgagctcaggaggcagaggtggttgtgagctgaaattgtgtcacagcactccagcccgggcaacagagcaagacttcatctcagaaaaatggaaaataaaaataacattgtgaattttaatacacctacttttcggactttcaatatttttcttttttctttttcttttttttgagatggagcctcccttcattgcccaggttggagtgcagtggcatgatctcagctttgtaacctctgcctcctgggttcgagcaattcttccaccgcagcctcctgagtagctgagactaccagtgcacgccaccacgcctggctcatttttgtatttttagtggagaccacactgtgttttaccacactggccaggctggtctcgaactcctgacctcaagcgatctgcctgcctcggcctcccaaagtgctgggattacaggtgtgagtcactgtgcccggccagtatttttcaattactttaatgttctggaaaaaaattatcttaaaaaatatacaaaattcccagccaggtgtggtggctcacgcctgtaatcccagcattttgggaggctgaggtgggcggatcacaaggtcaggagatcgagaccattatggctaacatggtgaaaccccgtctccactataaatacaaaaattagccaggcatggtggcgcgcgcctgtagtcccagctactcaggaggctgaggcagaaaaatggcgtgaaccttggaggcggaggttgcagtgagcaaagattgtgccactgcacttccagcatgggcaacagagcgagactctgtctcaaaaaaaaaaaaatatatatatatacatacacacacacacacacacacacacacacacaattatgtatctttctttgcctcagctccctgtggttcaccacagcactgccttttcacttatctagttctcaagtttatatgtaggtaactattctttgatgcccttataagttacacgaccctgagtggtcagcatcccccaacttcttagagggacaagtggcgtgcagccacccgagattgagcaataacaggtctcttctttttatgtggctcttccacctacacgtgcctacctgccaactaaacttgcacatgtactgtagtcttccttatccccaaaatgcagcttgcagatggaacgaacaactgccagtccccctcatgacaccaacacgacaaaaaagagtcatcccactaatccctttacttgtggatttaggactttctgcctccactattgcacttggaactggaatagcaggcatctcaacctctgtcacaacagtctgcagcttctctaatgactcctctgctagcattacagatatatcacaaacttaccccaaaatcttacttcagtctaatctctcccacttcaggttcctgtgccacccctaatcctgctcaaagcagccctgagaaacgtcgcccatcacccctccatactgcccccaaaatttttaccccaagttttcattactctttctcgttttatttcttcattattaacataaaaaggaacgtaaggtcctctgagctggccacaccatggtaaagccaaggcattccccgccccaccctccccccatgataatgtactttgtgatattccccctccttgtgaatgtactttgtaacattcctccctgctattttgacaatacatcctccccgcccttgtgaaggtactttgtaacgtcctccctgcccttgagaatgtacttgtaacatccatcccctgcccgcaaaaattgctcctgactccaccgcctatcccaaacctgtaagaaccaatgataatcccacccttctctgactcctttctcggactcagccctgcacccaagtgaataaacagccctgttgctcacactaagcctgctcaggtggtctcttatacggacacacgtaacaatattaagttctctctgtgatttctacctcctgaacagattctgacaacctcaaagtgcagagtggatttcttcctgttctctttccctctcttgggcacttccccacatttatactttgctaattttctgtattccaagaaatatagtcctccctgccctgcacaggcattcatttgttcctgtgcaaattcaatccattcttcaagatccatctcatatgtcatgaaatcattctttaccctgcaccaaatgaaatgtttccttatttcatgggaccatagagctgtactggcatccataccatcttactgtaccttgttttgttgctatttgtgcatatatcctattccgccccgtcctcccatctgagttgtaactttgaagatcagggactgatcttctggtctttctcatctttgaacatttcctatttggtgaggtcaggagctttggagcactagtcacagagagaactggagaaacagctgggtcatgaaacaccgggcttctgcacattggtgggaagcaacaccagtaggtgttgaagttagttttctttacattcccagtgatctcaaagcttgcttccttttttgccatttctgccttgatgctcagttttggtcctgaaaggaacgattaacttttcttctttccttagcctgctgagcacagggtggcatttaaaacagttgagagcgctctctcccctgaattagaaagagagtgatttccaggaagcagaagttcccttgggatgtttgccagtgggagtcaaacagccctgtgtgaatggctttgtgagccaagaccttctcttcacagaagtgatgtgatgctggcaggaccctttaatgaagggaccatggtaattgagatcagtggggatattctgcttacttctatagcaatcaaaacacctcctacaaaatcaaaacattaggaacagcccatcctcagcctcccactggccccaactttgttcttttagaaaagtcaaagcccactgagactggggggtaactttgtcagaagtttgtttatttatatagtttaaagacgattattttcaaagtggaagccaactgatttcagactacaaaaagaattttccaaaaacaaagctacgaggtcaagtttcagcttcatagaagggataatttgggcaaacttcgccaaccacaatagaatatgacatattaaattactgctctggaaaaggcatttgcgtttgtagacctcaggaaaccctgaatcttgagtgcagtctgagctgagagctttccctgagaagcttgcatctttataatactgactgctgacccactttaaggtctttgtccccaaaccacagagagaagaaaacaagataatgcaggtcctactagagactcttgtaccttggtgtatttatgcacccactggtgggcattgcatttccaaactagggccatggttgatttcatgctcaacctcatggcattatttactatagaatagaggatgaaaaccccaaagtatcacactagattcctggtcctttcagtatcttttcaaaagcttggtggggttttcttttagagtcagccacactaactctttttgatcattaagatgctctttgcggtaaccttctgtaggtaaagggagacatggtacattacacctagaggtaaccaaaggagaaaatatatttccctaggtccatctgtttcttgttttaccttctcatttattcattcactgagagcatactctgtgcctgcaccatgctaggagctggtatgcagcataaataggaaatacataatcactgcccccagggaacagcctcttcaaatactcaagcctagtgtaattaaggtagctccctccggatctttgaaaggctttaacagcgatagcccctcaactgagaaactttggatgtactcagtgaactaagtcaaagcctcagatatttgggcatgggaattttatgtaaaaactaaaggtgcttttaaaatatcataagcggctactattcactctgcccgccccccaccaagtggtttcaaccaggggcaattttgcgtcccagggatatttgatggagacatttttaatagtcataactggggagagggtgttattagtatctgataggtagaggccagagatactgttaaacatcctacaatgcacaggacagtaccccaaaaagaataatctggcctcaaatatcagtagtgttgagtttgagaaactctgttttccaccaatacaactgtaactttttttctacttttaatcaagaaagacaactattttgaaaaataatgctatacttgccgagtttataacttacatttcacattaacagtaagctgtaattggtatttacatgtatcttgactatacagttgggtttttttttccctgtctttcacttgttatcacattagatgttgggaaagaactagtatttttgattcccagtagttctgcctgactctagcttatgagcagaaaacctcttttgatcttcaacttcttgcctctaatggcctcagcagacattctatgcatctgcccccatcacctcttgtctctttctcagaaaggtcctgggaatttagtattctttctttagagatagaaaacccgaaagcaaaaggagaaggcttaatcaaggtcacctagcagggctttgcacgggctttctgcctctcccttggctcattattcactggtcccttcgggggaaatgtacactataaatcagaaaagactatcatctgtactctgctaaatgtgtaaaggttaaatttagtcaggcaggtgatttatacttgcttatttcctttaaaacctcatggagaattaagggagttttcagctaggatgacaaggaaggaaatctaatatttcagagttctgctgttattcttcttggagtatgaaactatcatttgtttaaaaattccatgtatccaggaaggcttgcatcagaatacatttttgtagacattaactcatcataatttgattaaacaaaattttggtgttgcatctgttaggaatatcctgagtcacatcatccactcaaggcagagaaactggtctgcaaaagcaagggtcgagaagtctcatgaggaatgtagtagaccgactgggagaaagtttctaagaaatgatatgaaagggtttggtttggttatggagatcataaagtgacagatttttataaaactagtggaactgccagcttaggagattttcacgcactaagtcaggccattcactttctttccttaggaggcaaaaagcaataattcacagttatacataggaaaaaaagcatattccctcctttccaatgtaccgccctcccaccttttctcattacttattttcctttcttgtgatttttttctttattattatgatcaacacatatcagacaatatttggtgtcaaagatgtacttagagtaaacaatatttcctaaggcctcatttacaatattcgaaacttgacctggagagcaggtagatttttatgttagtggccccactgagaaatggagaacaaggtggttcaccatggcgcagggacattttgtgttgggcatgacaaaatatttgaaattaacagttatgcccatcaccacagtaaaaggtgactttcagaatacttaaaattcaatagcttagtaatgtgtgatcttcatccacccctccacctccacctctccttgctatttctgaggttaagacttgtactcttatctgaggaacatgactcagaattagagtacatagtctatggaaagatcatcagccttgacttcctgggctcaggtgatcctcccttctcagcctccgaagtagctgagactgcaggcacataccaccgtaccatgctagttttttttttttttttttttggtagagatggtgtttctccattttgcccaggctagctcaagtgatcggcctgtgtgggcctcccaaggtgctgaggttacaagtctgagccactgctttctttatatcactttactacgtaaatgacttcttagttgtgaatacatttgatttagtggtaaataaatttcttctccctgggttgtggaaatatgagtttctaatttcatgacagaaaaactcagcaaccaactgtatttcttaattatactttcatctgaatgctgcttgtcttaatttgttatgctacaaatgacataatagtaacccaaagatttgccgtctaaacatgtgtcttttaaaagctcaataacttaatggtgcattttcggctgaagccagtgttttgttcgtacaattcatgattgctttctgttaaaaagcatgactgtatattagaatagaatttaacccaatttattatgctaaggcatgaacaatcaatggaacataaccaacgattgaatggtaagactcgaagaaaaaaagaaactgccaatcaaccaaatatttgcaaaattagttgcaataggctgaattttgtgtcccctctaaaaattcatgtgttaaaatcccgacacccaagatgatattattgggaggtggtgcctttcggggtggggccttttgggaggtcctgccctcatggatggaattagtgatctggaaaaagaggccagaaagagaaaaagagtggggaaaactctgaccccgactctcatcatataacttacatgaacatcagcattccagaagacggctcagtggttctttgaaataatctggaattaggggatgttgtctaaatttatctgcctgcatcttgttccaataaatatataaattataggttcaggacttccaaaacagggcaaaaactgaactatcagaaggcatggcaaaaacagttacagctaatattgagaaataacaaactgtatatacatatactcgtacatttttctatttagtattcatttatttatttttccaaaaggaataagacccacagttttcaatatattctcaagtgatccataaactataagaaattaaaaactgcctgtaaaaatctgcatgataaataatatttatcataatgatactaaaatgtaaacaccataaaggcaggtgttttgtctatttttgttcacttttctatccccagtacctgggacatagtagggactcagtaaatgttcattaaatgaaggaagaaatcacacaaatgcattgtaagagcatagtattctactaaatagctaaagaaaggccaaatgttattcaatacaaattaaatgttcctgctttctctcttttttaattttttttaatttttattattatactttaagttctagggtacatgtgcacaatgtgtaccctagaacacgttgtgcacatgtaccctagagcttagattatagctgttaagcagaatattcaaatgactagtgccttaggccattgagggtgctgtaacaaactaccataaactgggtggcatataacaataaaaatttacttcttacagatctggaggtctgggaccgccaagatcaaggcaccagcaaattcagtgtctggtgaggtcatgcttcctggttcacagatggctttctcaccgtgtcctcacatggcccaagagacaaaggaactctcctccccattgtctctctctggtctttattatgaggtcactaattccatccatgagggcagtcactctcaaaaggcctcacctcccaaaggcgccacctcctaatacaatcatcatggatgccaggattttaatatatgaatttttaggaggaacacaaaattcagtgtattgcaactaattttgcaaatattggctgattggcagtttctccacttttaatgccattcattggctcatgctgcctaaggagtcttgtggcttttgctcttttttgctttatctgcccatttgtcaattttctgcaagcctggtggagaccaagcaactcaatcagctcttcctcttcctattgccctcagagcacctcctagtggcaaaaagcaggcattgtaatcccagcaaggcttttgaaatttgcttctttcatccatttatttagttattgcctgcaaatgtttcaacgataatgtaatgatccctctgctgtccaaaggtttggagaatgttatgaaagaacatttttgtttttttctgtagcctctgcactgacctgtatttctgttcccaggtgacttgtaccacaatttggggcaacagaacatgcatttaatgttgggtataaacttttaataattagaaaactgagaatgccaagaaactattacatggtacatctgtataagagtatttagaataaaatgtatgtgttttcttaacacaaatcaagtaattttgggagttgataaaaggctaatagttcagaaaattaaaattatatgttaaagtcttctatgaaaaatacttaacataattgccatgtgagagagctggtaaacattaatgaaatttcaaaatcagtgcatagaagagggacatggtcgatggttgaaagtaaacagcagactggccagaaatctgattacaaagaccatgcaaaaatgaatagggcctgaagataccaaattccttctgttttaaaccaaattgattttcccctaaaagagtgttaataaaatacttcacatagtgagtttaacttttctttctcagtctctaagttatctggtataccattgtttttgatgaattgcttcttccttagtttatgttttgtgtcatttcaatctaaattggttcaaagggacaccttcagattttcttcattggcaatgactattgagcccctatgagagtacagtagtccccccttatctgagggacataccttctaagacccacagtgcacattttctatacatacatacctgtgagagttaatttgtaaattaggcggagtaagagattgacaacaataacataataaaatagaacaattgtaacaatatgctgtaataaaagttatgtgaacatggtctttttctcaatatcttactgtaatgtactcacccttcttgtgatgatgtgagatgtgagatggcaaaatgcttacgtgctgagatgaagtgatgtgaatgacgtaggcattgtgacttagcattaggctactattgaccttctgacctattgtcagagggaggatcatctgcttcaggtgattctggatcattaagccacaaggatgacgaaggttgggagtcagaaacagacagtgtcaatgactgatgggtgggttgtgtctacagtgtgaatctgctggacaaaaggatgattcctgtccagggcaggacaaagcaggacaacatgagatttcatctgagatttctcctcagaaccacgtgcaattaaaaactaatgagttgtttatttctgaaatttttcatttaatgttttcagaccatggttgaccacaggtaattgaaaccctggaaggtgaaactgcagataaggaggactacagtgttcaactatttacaaataatgacagtggccacaaagattaccttgaaaagagaccgtgagacagtttcacacagactgtgcctggatttccatgagtctctgccaactgctttttaaggtattataccatataataatgttttttaaatcttttagttggaagtgattttttttttcttgagacagagtcgcgtgctgtcacccaggctagagtgcagtggcaagataccagcttactataacctccgcctcctgggttcaagcgattctcctgcctcagcctcctgagtagctgggattacaggcacctgccatgatgcctggctaatttttgtattttcagtagagatggggttttgccatgttggccaggctggtcttgaattcctgacctcatgtgattcacctgccttggcctcccaaagtgctgggattacaggcatgagccactgtggctggcattttgaagtaattttagactttaaaaaaggtgcaaaaatagaatagagtactccgtatactcttcatccagcttcccctgtataactatagcacaacattttacataactatagcacagtcatcaaaaccaggaatacagtactgtttcaattttaaaataatgtgccttagctgatgatgttcttgctatacttttctttctcatctctttaagtctttgttgcttctcttcttcagaaagagtaaaattgaattctagagaggtccactcataagaggcagacctgggcaatgaactcgtttttttgccctgtgctcttgaaactggattctcctttctcaacagcgttaagcttcagttctctatgttgccaaaagccaaagttttagcctggggctcagaatattggcttatttttcctgtataaagaactgtcagactcttcttgacaggggttcatattaataaccctaatctccatctcacggtagaacatgctgtctacttaataagaacttttgccccttttctgttaatgccatccctttacacaaaaaatgaaatacatatatcatgaagctaattatgttcagcttaaatatttatttcaggatggttctaaatcctatctctggtctggtttagtgattttcataatgcttagacatgatgaccatttcaaactgaaaccaagaaagaatatgaatatttctttataaaaataaaaacacttttctttaattaaaataaaaccaagaagtttcatgtgaaaggtcacatttctagctcgtgctgtgttgtcagcatactcctccagccttcttctctctctctctgtgtgtgtgtgtgtgtgtgtgtgtgtgtgtgtgtgtgtgtgtgtgtgtgttgttttgggaatgtgtatagcatcttatcaggagctgttggtttgaggtcaatgccatctccactgtcatcccgatcaacagtaaatacaagagtagcttcatgttctccacaacaatagaaaaatccctcctgggatgttctttgggaagtacaagaaaaagccattaaaagtttcatgttgacctttcttgctttacagaggtttgttggcaggaagtgtcttggttttcttgatggcagagataaagaaaaaaagaaaaaaaacaaacgtgaaaaattccaaggatcaatttgctattcagtttggaaaatagttatttacaagaagcactgtggcatctacaagatcttgctacctcacccaactactccctccctaatccaaaaaaatgagagaaacccattgcagtctgtggttggggttgattaaacatcccttggggccctaatgccctcgaaatgatgtgaaatcactgggttgtgtatcaaaagggcagggtgagctcctggctcatctgactttaatctcaaatggctccacactggtagttgagaacagacaattacttcattaacttttggaaagtctgaggcatttgtgttgctttctggactgtgctctgctacagggagagaaaagacgaggtccaacgaggccattcatgcctgccaagttttcctttctttccaatccaggaaacatacattggtagtgggtaagatccaatattttataatgctaagacagagagactcacccactgaacagcccagagtgaatattccccaagtcttggctggcatgtaagcccagaatcttcacccttactctcaaaccttttgccacctctatccaagaattatttttaataatgtcatgttctcttctttcccttaaataaatccactcatatatgaaaattaaaaagatttatgtgtagggaatcatacacatttgtcagatttatctgtaactttaggaatttttttttttttttgagacggagttttgctcttgttgcccaggctggagtgcaatggtgcgatctcggctcactgcaacctccgcctcccgggttcaagcgattctcctgcctcagcctcccaagtagctgggattacaggcatgagccaccacgcctggctaatttattttattttatttatttaattaattatttatttttagtagagacagagtttctccatgttggtcaggctggtctcaaactcccgacctcaagtgatccgcctgccttgggctcccaaagtgctgggattacaggcttgagccaccgtgcccggccaactttaggaaattttagagaagatttagaggatggtttagagaaaaatattatgcaggagacattgaattgttaggaaaagccactgtagaactgggggctgttattgccaaaaatattagtttggtacaaaagtaatggcgttttttgccattactttgaatggtaaaaaccgccattacttttgcaccaacctaacagttaaaccagcaaaagcgacacacattttacaaaagagtcatgtaattctgtatctgaaactgccagcagcagggtgttttttcatccattactgccatctgaatattttcatctttttgcctctgggcattaaaatgcaactaatccaccacccacaaaacccattagcataaacagtaaaaaaatgagtggtcagactacacagtgatagcactgaaattacttgagtaaaatgcagatgtaatgaggatgtcagtttcagagcagtttgcatcataatagactgaactgtcttggacttcaattctgggttcttttctagatgactattgtcctttttttaaaaaaaagaaaacatctgtgtcctgttactttttttttttttttttttgctttcccccaaagttttctgatgttagaatttagaattttgtctactgtttaaaaaggaaaaagaaaaattttccactagctctcctttgagagaatgagagaattctaattgcttctccactataaaagcacaaacttccatgaaaatggtcatcggagagcagaggtgacaggatgtatactgctgaacttttttgcttccactcttctagataactgctgagaaaggccccctttagctttgatatccaaaaggcaaaacaaagaaggtaagcacctttcagcagggcaaggacaactaatgtgttcttctgcccactgcagctgagacccatggtgcacctgcattcttttaactgagacaacaaaattctccctttaatccccttttggaaggaggagggagagagtactaccatgatgtatgtattttcctttccttacctctttgttcctgagtttttgcttttcagacaataaaatcattagaattagaagaattattattattattcctagtaatgtagcaactgtcagttccaaacaagcctccttggctctgacaatcccatgctctgctatacaacacagtgaaaattgggagcataaactcattctgttgcctcaacaaaattatattatggggtgaagtctattggggatggggcagggtacttcatagcatgaagagaatgcagaataatgttcttagtcccctgtctgtgtggcctattgaaagggaagagattataaaccctactgtggagttaataaaagtagaatctgtaggccagggactgcacgcaagttgacctctgttggggaaagctctgggggtacagtgctgagaacctctcctgggagtcagatgttttttgaattatctttctgtttgaagaagaatctgccttccattcattcattcagggctcttttgagtagcccatgtttcaaatgagccaggagggaccagacatgtgattataaaaatacattgaaattgccaaggtggagtctacagcagtggtccccaaccattttggcacacgagggaccggttttgtggaagaccatttttccacagaccaggagtggagaggggaggatggtttcgggaagattcgagcacattacatttattggacacattatttctattattattatattgtaatatataatgaaataattatacaactcaccaaaatgtagaatcagtgggagccctgagcttgttttcctgcaactagatggtcccatctgggggtgatgggagacagtgagagatcagaaggcattagagtcttataaagagagaacgaattagatccctcccatacgcagttcacaatagggtttgtgctcctatgaaaatctaatgctgcggctgatctgacaggaggccacgctcaggcggtaatgtgagtgatggggagcgactgtaactacagatgaagcttcacctgctggcctgctgctcgcttccctctgtgtggccctggttccagagattcctggtctacaggaactcgtctctcttaggtcttttttcttgaagagggatttgctttcccaaacttttttttttttgagacagagtctccttgcccaggctggagtacagaggtgcaaccttggctcactgcaaccttgacttgccaggttcaagtgatcctcccacctcagcctcctgagtagctgggactacaggtgggcaccaccatgctgggctaattttttgtatttttagtagagacagggtttcaccatgttgcccaggctggtcttgaactcctgggttcaagtgatctgcccacctcagcctcccaaagtactgaggttacaggcatgagccaccgtgcccgacctttctggaattttttttttttttttttttttttgagatggagtctcactcagtcgcccacgctggagtgtagtggtgcgttcttggctcgctgcaagctccgcctcctgggttcacaccattctcctgcctcagcctcccgagtagctggtgccgccatcacgcccggctaatttttgttttttttggtatttttagtagagacggggtttcaccatgttagccaggatggtctcgatctcctgacctcgtgatccacccgcctcagtctcccaaagagctgggattacaggtgtgaaccaccgcgtctggccctttctggaattcttgaatctttaataagattctaggctatatgtgcctttggttgaattctcctgagttgtttctatttctctgagtttgccatttttcttcctctattaagtatctgtattccagggttttgtgtaattcaccaaagcttttataataatttctaagaacaattttgatcaaagacctaagaagacaaataaaattcttcagtaataggtataattttcatcaaatgattgctttcctttttttattgttagggctctattgctaaacgtgaaaggggagctgtctcatagataaaaccctctggtgttctgaaggatgaatgggaacagtggaggcaatttatcagaagcctgtttttctctgccaggtcctccagcccatttcccccaggtccatggagaggaaactctcataggaaactgacataaacatagacatttcactttggtccagccaatctaccattaagaatattcaaatccatttatgaatggatcttgagaaagaaaaaatatattgctatgttggttattttgtaaacgcccaatgggttcactttgcttgcctaaacagagccaatttatcaagacaggggaattacaaaggagaaagaatagttcacgcagtgccagctttgtgggagacaagagttttattgttactcacatcagtctccctgagcattcagggactggtgtttcgaaggataatttggtgtgtagggactcgaagtggggagtgctgattggttgggttaaagatgaaatcataggaggtcaaagtgagttcttgctgtcttctgttcctgggtgggattgcagaattggttgagccagattaccggtctgggtggtgtcagctggtgcgtcgagtgcagggtctgcaaaatatctcaagcactgatcttaggttttacagtagtgatgttagtcccaggagcaatttggggaggttcagactcttggagctggaggtcgcatggcccctaaactgtagtttctaatcttgtagttaatatgttagtcttgggaaagggttattatcaattttgtttcagagttaaactataaactaaatttattcccaaggttagttcagcctatgccaaggaatgaacaagaacagcttgaaggttagaagcaagatggagtcagttaggtttgatctctttcactgtcatagtttcctcagttataatttttgcaaaagcagtttcactttctagtgtctaatattttagtaagtccttctccttcctcccattttcctacctttttgatcctttctctgtgctacttgccaaagtgtgccaatttcaattcactcatttattcaacaactactccttgagcatcatcatgcacaaggcactagactaaacactaaggattcatccgtgaagaagacagacaaaaaaaaatcttgtctttgcgaagtttacgttcttgtgagaggaaggcaataagcaaataaaagagtaaaacatatgagtcagatggtgcccaggagaaaagtgatgaagagaaggatatatgaaatgcttcttcgtatgctgttagggcaggggagagagttaagttttggcaaccatggtcaggaaaagcatcatcaaaatggtgacatttgatcaaagacctaagaagacaagggaataaggtgaacagataaccagtgcgttgcgatttttgggtagggctcagtggtgaatgctcctgtctgctccacacggcatccacagaggcgtggtggtggcaggtgcctgtagtcccagctactcgggaggctgaggcaggaaaatggcgtgaacccgggaggcggagcttgcagtgagccgagatcgcgccactgcactccagcctgggcgacagagcgagactccttctcaaaaaaaaaaaaaaaaaaaaaaaaaaaagatggtcctaatttcaacaccttgtatgttaagtctctggataagcattaccacctttaacagtggtttataagtaaaaattgtattttgccacaaatctgcaatttgggtagggctcagtgaggaatgctcctgtctccacacagcactcaacagaggcagctgagccgaaggatgggggtatgtttccaagatggcgccctcatgtggctggtgagttggtgttggctgtcagcttgggagtttggctgggggcctcagttcctctccatgtgcagtgtgcacctgtatgtgcaggaatggaggaatggagttatcatttactgagaagtgaaaggctaaaggaggagcaagacatctggagtcagatgttggacacattaagcgtgagatgtctgctaaatattcagcaggcaactgggaacctggagttcagaatggaaattataaaaagaaattgccctaccaagggaattaacatccttgtctttcattactagttaattatgctgagctgaccaagacaggaaatggccattacccatacttatccctaatagaatgtgtatatttatccaaatgtggtagttttaaaacaagttctttgacattcttcccatcaagagatggaatctatgtcccctttccttgacctaggcaggcatttgtggttgccttggaaccaactgggtatgacagaagtaatgttatggaacttttgagggtgaggcataaaaggcaatacagtttctgcctctctctttgggatgttcatccttgaaacccagccaccatgctctgagaaagccagggccacatggaggtgcacattgcttgtggagaggaactgaggaccccagccgaactcccaagctgacagccaacaccaactcaccagccacatgagggcgccatcttggaaacacattcctcatccttcagttcagctgcctctgtgagtgctgtgtggagacaggagcgttcctcactgagccctactcaaattgcagatctgtggcaaaatacaatttgtactgtataaaccgctgttaaaggtggtaatgcttatccagagacctaacatacaaggtgttgaaattaggaccatcttttttttgtttttgagagggagtcttgctctgtcgcctaggctggagtacagtggcgcgatctcggctcactgcaagctccgcctcccgggttcacgccattttcctgtctcagcttcccgagtagctgggactacaggcgcccgccaccacgccaggctattttttaaattatttttagtagagacggggtttcaccgtgttagccaggatggtctcgatcttctgacctcgtgatctgcccgcctcggcctcccaaagtgctgagattgcaggcgtgagccaccgcgcccggccaggatcatcttctaaaaaatttttttttagccattgtattgctagtgcctggcattgtctgagtatatgcagtaggcacgcaatagctgttttaaatgaatgaaccaagatgaaacatctgtgaccatcttacaaatggaaggagggaaggttgaaaacactgagaaagtctcctagtttggaggaatagagttcagctcaggaagaacgtagttcagggtaatttttttttttttttttttttaagacagagtcttgctctgttgcccaggctggagtgcagtggcatgatctcggttcactgcaacctccgcctcctggattcaagcgattctcatgcctcaggctccagagtagctggacttacaggcacatgccaccaagcccgagtattttttgtgtttttagtagacacagggtttccccatgttggccaggctgatcttgaactaacctcaagtgatccactcgccttggcctcctaaagtgctggggttacaggcatgagccaccgcacccggccagggtagttaaaaattgtatgctctgaatgtgtaaaacaggttgtccaagaaatcttatggacaataaaagtcatttactttggaaattattctaaaacattttgaaatagagcaatgttagaaatgagatgctgcctctgctagttgcctcagagctggttagttagcagaggatagattttctcggtttaatagccataaaggatcttcatattctgatttgatctgcaaatgtattcaacaaagtgactgcatgatgaaagcaagaaaattatataaataatttccactccaatttttcgtatatgcccaaagtcataccagtgtagagccttaacatgtttgtatgtaggggacagggaacagaagcgtattaatagacacagggccattcaaggatcctctacaagacagtcattcctgattgactagcctaaatcagaaaatggtgtgtatggttaggccaaaattagtctcttctttttttttttttttttgagacaggtctggctctgtcacctaggctggagtgcagtggcacaatttcgtctcactgcagcctcgacctcccgggttcaagtgattctcctgcctcagcctaccgagtagctaggaatcacaggtgcgtaccaccacgtccggctaaatttttgtatttttagtagagacagggtttcaccattttgcccaggttggtctcgaactcttgacctcaagagattcacccgcctcggcctctcacagtgctgggattacaggtgtgagccactgtaccttgcctacatcctgtattttctaaaacatgcattgcatttataatcatagtgcatattttaaagcaaagacaggaatctgggtctcttaactcaggaaaagatttaggtttaagttattgctttgcatatatgaattataataaatacttttcatgtggctgatgttagacagtgtagagaagagaagcaagagcagaaactcagggtccaccagcatccaaagcagtgatttttatgatccttcacagcttaatcatgggtgtgtgtgtgtgcttgttgaaaatgcagagtcctgggtctccagagatgatctcagtaggcccagaatgggatctggaaaactgcaatgtttggccaggctcataggtgattctgatgtaggtgaattctttgagaaacagagatgtgaaggacagtgcttctcttacctacaggactcaggtaggagaaaaatgagacagtcatggctgggaagccaagggacttttgggaaaatatatgtaaaatgtactaaaagcacattatgatgatataacaagatgttctccaccacagctgtgtattagaatcatctggggcactttaaaaatataccagtgtgcagatttcctcataatggtggtaaatgtccctctttcagcatgactaagagataagagaagctgcaattttccaattatctgtgcatagaagaaaaaaaaatccaacagagtgcccactgtgggcctgcagcaagcagccaccacaaacctatgggtgcagaaatcaggggagaggagtctcaagagattggggaaaagggtggagggaagcagagaacttagagaaaaaacagacaaagccactcccaaaagataaagtgaaacaatatttacaaagagaatgaacaaggccgggcatggtggctcacgcctgtaattccagcactttgggaggccgaggtgggtggatcatctgaggtcaggagttcgagacctcctggccaacatggtgaaacctcgtctctactaaagctacaaacattagccgggtatggtggcgtgcgtctgtaatcccagctactcaggaggctgaggcaggagaattgcttgaacccaggaggtagaggtttcagtgagccaagattgcaccattgcactccagcctcggcaacaagagtgaaactcggtctcaaaaaaaaaaaaaaaaaaaaaaaaccaaaaaaaacgagcaatgatgggcacttggcagttcagagcccaggctccggagtggggcctgacagtgtgcagaccagacatggagaatccatgcttgttggggagaatcagacacagggagaggagtggtgcttctgggagacaggcacagcagaagaggagacagaacaaaattaagcatcctgcagaaaataggagacacaacaactcttctatctttcctgtcaacatcagccacagaagcaactgcacagaacattgttgaactgagggaagaagctgctcctaactaggtctcctgcccacagaatgaacaggaagaggaaggagtggaccaacttctatagagaacaactgccaaagtcagaagttgcaaatcaaagtttttctgctggtgatgtctcctcgatataaccatgaacttgatgaaaattctaagacaacactcaatatttatgaaatattctccaacctgcatctgggaacatggaaaatatcaatatgttgaatcggaaatataaaaactaggtagagaaatcaacaaaaaataggagaaaatgaagccagagctgattaaattcaggaaaaaaaatagaagaaaatcacaaaactttatcagtaataaagaacagattacaaggtgccccgaagagaatgggttcaaataaaaacttaataaagggtattgaataaaagaaggatagccaagagaatgaaaaggagataaaataaaaaggaccagagaagatagttgaaatggaagccagacaaaggaggttgcatatttgtattattggtgttcctgaagaaaagaaaaacaatataacagaatatttaaaactctaatccaagaaaaagttccagaaataaaagaactgagtcaactctacactgaaagggcccagtgtggtatataggaaaactgaccacaaataattctgagatagctcggaaaattattagacttataaaaaaaaaatcctcaaggcttccaggcccaaaaaatatttacaaagagaattaaagattggcctcagatttctcaaaaataacatgcaaaccaagaaaacactggaacaccattttcaagaaacctaaggaaaaacaagctgctcttcaagtttcaaggtcacagaaaatcagtttcaaactcaccagaattccaggaatacagtacacgtgctcttgctgagcaatttactggagggtgagtttcacccaaccagaatatttctgggaacaaaaggaccaacagagatcatttcacatatttgactgtagagctgagaataatgtaagagttcgttcatgggttaatgaaaaacatggatatgtaaacattatatactgataaagtagaacaaatacaactaaaaaggtgggagaagggagagaaaaggggaaaagtagagtaacaccattgactgacatataggtaataggtgggaatcagtatcatctagaaaagacagatagtaacaggttaagaaagaaaaaaggggccgggcgcagtggctcatgcctgtaatcccagcactttgggaggccacggcaggtggatcatgaggtcgggagatcgagaccatcctggctaacatggtgaaaccccgtctctactaaaaatacaaaaaaattagctgggcgtggtggtgggtgcctgtagtcccagttacttgggaggctgaggcacgagaatggtgtgaacccgggaggcagagcttacagtgagccgagattgcgccactgcactccagcctgggcgacagagccagacttccgtcttaaaaaaaaaaaaaaaaaaaaaaaaaagggagtaagagcactacagaagattagtataaaagcaacccattagaataaagatacaagacccagcgcggtggctcacacctgtaattccagcactttgggaggctgaggcaggtggatcacctgaggtcaggagtttgagaccagcctggccaacatggtgaaaccccgtctctactaaaaataaaaaagtagttgggtgtggtggcacgtgcctgtagtcccagctactcgggagaatcgcttgaatccgggaggtggaggttgcagtgagccgagatcacaccagtgcactgcagcctgggcgacagagtgagaccccgtctctaaataaataaataaataaataaataaataaataaataaaagacacaaaattcataagccaaaagaaaacgcaagaggatagacacagtaaatataatacattcagcaattacaatctaaaatatgacagaattgacatcaaacatggtagttatatcaaaactagatcggcttaatttgcctattaaaaaagattattttcggattggctcgtatagcaaaaactcaactgtgtgctgcacacaagatacacaccgaaaatgcagcaattgaaatagctaaaaataaaggaatgaacgaaaatttaccagacaaatggaaacagtaagacagcaggcattgcaatcccgatacagaagtagagacttcaagccccaaacagaacacaaaagaaatatagagctataaaatggcccttgggcatatgaaagaatagcccaattattcataagataaatacaacttaaaattgtactgagattgtactcttcctgacccatcatattagccacagcaaagtctccccaaatctcattaatcttttttgcgcagcagctactcctataattctatttggcagcacttcagttttgtataaattacctattgattaatccccagaccattgggagaatactatcaatatacctcaatttaagaatcaagattataaggcattatcttttcataattatatatgtatgtatatatacatttggctagacatttttttcattagctttaaaattgtcagaggcgtctgaaccagagcaactccattttgaataggggctgggtaaaataaggctgggacctactgggctgcattcccagagggttaagtcattctaagtcacaggatgagattgtaggtctgcataagatacaggtcataaagaccttgctcataaaacaagttgcagtaaagaagccggtcaaaacccaccaaaaccaagatagcaatgagagtgacctctggttgtcctcactgctacactcccactagagccatgacggtttacaaatgccatggcaacatcaggaagttaccctatatggtctaccaaggggaggcatgaataattcagcccttgtttagtaaataattaagaaataacaataaaatgggcaaccagcagcccttaggttcactctgcctatggagcaaccactctttattttcctactttctttaaaacttcatttccttttcctctatggacccgccttgaattctttcttgcatgagatccaagaaccctgtcttggggtctggattgggacccctttctggtaacaaaatgatcaaagttaaagctgtagttactgtaactgagttggccttggaatgccatcccatatagtgccatgtttgagagctggttttcatttcattggtggcattagaaatgtactattatattagggttaattcgccctgctaccccaactagctagctacctccccttgggccaggcaaaatggaacagtagcttgtacatatgaattgttaacatgtacatatcttcatacagcagtcatgtctaactgtccctaacagggcaagggagatgaccggtcattttttctcatgaaaacaagatacactcaggtgagttttgagtttgttcaccatgcagaatgtgacgagataagtttaattttctagcttagtgtttttagcttaaaatgttgcaatctaaagctaaaatgttcacctgaggccaaggacaacacagcaaaaacaacagggccaatgtgtcctcagacctttggaatcgcagtcagatatcactatgaactgagtgtttgtgtttcccccaaatccctatgttgaaaccctaatccccaataatgggatgtggaggtgggacctttgggaggcagttaggattagattaggtcatgagggcagagcctcacgatgggactagtgttgaagggaaatgaagagaccatcttattcttcaccatgtgaggatgtgaccaagtatcctcatttttctaagaaaaagagaatgagttactatttttttctcttcttttctccattttccagtttcccatgtcctacttagccctttagaaatgcaattataattgtttacctctccttcacgagacactccctacagggcaaggctgtctaacatgtgtttcaaagctccagtgaaactctccctcaccaggagactgctcaggagacaacagtcaatttacaacccaaattatgcccgctacaaaactctcccccacctggagactttcggacacctttgtaatcgaattctgtccacaaagacgtcaactcaaccgcctggtagataaggcaccacaacgagtacagggacctccacctgctcactgccttccctgcatgtcattcgtgccaggccctccttttatttatttatttatttatttatttatttattgagacggagtctcgtctgtctcccaggctggagtgcagtgagccgagattgtgccactgcactccagcctgggtgacagagcgagactctcaaaaaacataaataaaataaataaatatcctacactggtcaggacaactcccttcaacaaggaattattccctgcaaaatgttagtagcgttcaggatgagaaaccatgctttacagataatcagctgtcttaatttttatttccctggaacttttccctttgtctctcatttgggacaaacttgagggccaaaatatggcagcaaaatgttttagatcaagtaaagactgtaaattaggtctatgaaatattttcccagcactgggagacacatgttggccccaacttcctactcagacttgcaattaagacacaacaggtgtgggtacccaacatgcgaagacttctcactggtctgtacgtcagtaaatggtcaagattgttactatggaatcattcacaccagcacaatggt

SEQ ID NO: 79 - DNA, 108535 bp, Homo sapiens
cgcgaccctgcgcggggcaccgagtgcgctgctgtgcgagtgggatccgccgcgtccttgctctgcccgcgccgccaccgccgccgtctcccggggcccccgcgcacgctcctccgcgtgctctcgcctaccgctgccgaggaaactgacggagcccgagcgcggcggcggggctcagagccaggcgagtcagctgatccggcccaccccgctcggcacccgagagagacccctagcggcgccgccggggaactgcgcccgctcgcgccgggaggggccctcgcgccccgcgcccacaggtgcacgcgcccttggcgccgcctgcaccccacgcgccccctccgctccccggccgacggcccacctgggcttcgtgaacagtgggagggagagtctggggccaggagagggacggtgcaggatcagggaaaggtgagtcctaggacgctgaggctctagaaaagtcgagagcgctcctgctcgtccccgtgagcttgaatcatccgaccccgcaggcctcccgggggtgtcgtataaaggactgctgctagggtgcgtttttatccgcatttcgttttttctctcggtttggagaggtggggcaggcgtttctggaagagaatgagaacgagtgaagcttaaaggaaataggattttctttgcttgttgagacagcaaaacctcattttttaacccccaacgtcaaaagcaggcacgagcaacctggaatttctatctttagaacgaaccaaaggagcaaggcgcaggacctggcaaagaagcggccaacccatttacttcttcttgaaagcagggttctgggcttgggttttgtttctttcttatatttttgtttgtttttggttttgttttgttaaagggggtggtcagtgtggattttgcggggcggggggtctttttttgttgttaagcagggatgtaacatccatctgagttggggaagaaggaaaaattaggagagatcattcgtattcgacccccgtaaatgaggacttctgacctcaaacgctgcccttgttcttcattgtgtctgtcctgaattatagaaatgaaccttctgccatgccactttctcctggattaaacacaaaccgtccactgtccagttagtgtccagatagtttagaatgctctagaactgcccagatatatcccctgctcttgacctgaagtagcatttagttaccaagccacagcccactccacacagggcttggagcgaaggactgaagccagggagtgctctggcccttctgagggctgcactgcagcctgccttctctcccttgctcattgcgctgacaagggtgcctaggcccgggaaggatggctcagccagcggggtacagacttccttcctgggaagtcatttctgtaccagctcccctaaatgttgtcttgtgtgtcttttcccgcactaggcattcagtcttgactcttggattacttttgcccctgaatgtcctttggatgtcctcaacaaataaggacaaatatttattgtcatgcagtatttgtttatacgcttcatgtcatttacttcctacaaaagccaaagaggctgttactattattcctatttatacatcaggaaaatgaagctaatgaactcccaaatctaatagcaagtaagtgacatgaagctgggacagcagggaaaagcctaaagtgacaggacaaacccagttgttcactttctgcaccacatttacccaccgcaattccgtatttgttccgggtctgcatgagcaaataaggcaaaaaagaaggtatctgaatgcaaagagaaacgtggtccaaagctacaaatcttgcagagtccactgcaaaatgcaaacgtgagaccctttgttacattattaagaattttaaggccgggcctggtggctcatgcctgtaatcccagcactttaggaggcccaggtgggcagatcacctgaggtcaggagttctagaccagcctggccaacatggtgaaacccccatctctactaaaaatgcaaaaattagccgagcgtggttactcctgcctgtaatcccagctactccagaggctgaggcaggagaatcgcttgaacctgggaggcggaggttgcagtgagccaagattgtgccattgcactccagcctgggcgacagagcgagactccacctcaaaaaaaagaaaaaaaattaaattaagaattttaagatggcaatggcagagcgttaaaccaagcatggggctcctcccaccgcagggcctgtgagactctccagggttgcatgcccatgaagccagccctgggaaggaggaggcaactttaagagtgagggacttttctttgggaggctgaggcgggcggatcacgaggtcaggagatcaacaccatcctggctaacacggtgaaaccccgtctctactaaaaatacaaaaaattagccgggcgtcgtggcgggcgcctgtagtcccagctactggggaggctgaggcaggagaatggcgtgaacccgggaggctgagcttgaagtgagccgagatcgcgccactgcactccagcctgggcgacagagcgagactccgtctcaaaaaaaaaaaaagagagtaaggaacttttattgagcatgaaattcaaaattgtagagatgagatcataatctataaaaattaaagttcttagatttagcagtttctctttccactgttgaaattcaccacactgacacattccctggtcaagatgttcctgggggaagatgattatgctgctgattgcgtcagaatgatggacattgcctgcatgttctctggttccttcactactcagagatcctgatggctttttgcttttcagccactagctctgttctgcatttaatgccatttcctgccctgaggtgtcttgcagatcctccaagcagaaaacgcaggaacatccctagttataaccctacaaagttggggaaggaaccaacaaccacttgtctgctggaattcctacaacagcatccccatcctagtttcaagtgtctccatttgtgagatattcactggctctccagactgtgcattctatctttgggcatttctggttactagaatgttcttatcccatttaaagctcacatcccccgcctttaaactcccactcagatatccttgtatccccagtgaccaagcagaataattcttttccacacttcagatctttacaaatttgccagcggttttcatgctacttcttcctctagagtcttctcttcacaaggtaaaacaggcacttccttcaacagttgcataatggcatggtttctggttccttccacaccttggccattctctaaatgtgttctggcttgtctgtgtctttttacagtactcgaagtgtgctctgactgctgcaacatgggagatgttgcccactactctgcctggagcctcatgttgcatttgactgttttagtaaccgcatcccactgcagactccaattggtccagataccccatttctattttatgcatagtctgctgggccgcgtttctgtcgtcttgtgtttaggctgttatctgtgccctataaatatcaccaaaagcaatcgttaagtctgagccagatgaaccctgcaggggtgccataacttaccatagactggatggatcaaacaccagaaatgtatttcctcacatttcaggaggctggaagtctgaaatcgaggtgttggctgagttggttacttctgaggcctctctccttggcttgcagatggccaccttctccctgtattctcacatggtcttccctctgtgtcttactgtgccctaatctcctcttgttataaggacagcagatattgggttaggatccatgctaatgacctcatttaaccttaattacatctttgaccctatctccaaatatggtcacattttgagacactgtcgggttaggacttcaacatatgaatttgggggtgggggtacataatatgtccttctttagaacagctaagacttattctataatcctgtcactcatctttggcctttatttccagtgacctttctttcattttcagtctgaagatcattcaactcaacagaaaaaaaaaaaatagaaatggaagagatctactttctgtctgtcctgcatcagcattgcatcatgatccccatgcagctggcttacccctcccgcaatcatcaggctctgaaaagaaagaaaatgaccttttatactttcctttagaaaattttgtcaaagcttaaacattgacatttaatgacatttaaaatctgtattagtttactagagctgccataacaaaatatcacagactgggtggcttaaaccaagaaatttattttctcacagttccagaaaagtctaagatcaagatgcagataggattggaatcctcagaggtctccttggcttgcagatggctgcacccttgctaagtcctcacacgttctttcctctgcacaggtacctctggtatttctgtgtgtcctaatctcctcctcttacaagaataccagccagattatattagggcccacgccagtggccttaatttaattagctcttcaaaggccctacccaaatacagtcatgttctaaggtactgggggttagggcttcaacatatgaattttgggggaacataagtctataaccaaacctctaaaattcccctaaaattattctcacattttaagctactctgatgtccgtccttgggagtggattccttctactttttattcatgtccttttgaaatcagaaaccttcctaggtaattagaatatttctttagctgcttcctggttgaatatatggattacttagccactccagacttccggtagtgttgggaattaccatgctttccatgaagatgtgagcttgctgggtatcatgtacgttggcagacgcagtgacgtatttgagagtttcacatgcctcttaacctgtctttcctcccagaaccgtgtgctaactcctcatcaaagaccagaagtagatcctgaattgtattcattctcatctctttctacctcctccaagacagaaggacatgattaacttctttatctcaatgtcagccttcaatagctacaaaagtctaaactgtaaatagcgttgaagctttgcataataaaattcttttccccagtgatgggcagtttttcacatagtaacattcttttaatctttttttctttttaatgagtagacataaagaaatgcttaaataaataattatcaactaacttacctacatttaactacacatacctaacagacctgaatataggcagaggatgtgacattttacttacccttttattaaagttactgcttcatttattggtctttacttcactagtgcatccataaaatgtttacatttttttaaacaataaaatactcttgaaattagtccttctctgtaatcactacataaaactgctttagagacagccttcagatcaactaaattatattttacaaaatggcttaggtatttcagtagtaactctatggaacaacagaattcactgtttaaccagggaccaatattggcagctggcttccataacttgtttgaggaatgtagtaattccaaggttgctgcaaggactaatgtacaggaatattcctgtattttatggaataaaaaggaagaacgagaggagaaagaaatagatagtacataccaaccccagaggtagggagtatgaaaatcaatcaagtagccagaagatgtaatggagccatgtgggtcttacgtcagttctcttccttagagaactttggataatagggcaacaatatgctctggtggaaaagaactcaggccttgagaaagcctgagcactacagtttctgaagaatgctcctttcattaggtggtgtggtgatgaattgtaaaggcacccagcacagtgcctggtttaccatagaaatcggttcttttttcttgagagaacaacaattcgcaatagctgtcacttaagtgaccagcataatcctggctttgagcttgccaggggctgccagttagaacaatggctgtcaaccccgtgttatttatttagatttcctaagtaatgttttgctaataaaagctccaaatttgtgagtgatttactcttgttttatttatttaataaagtggcacgatttattaatttaattaattatttaattaattattagcagtggcacaatctcagctcactgcaacctctacctcctgggctcaagtgatccttcacctcagcctccagagtagctggggctacaggtgcgcactaccatgtccagctaatttgtgtactttttgtagagatggggtcttgccatgttatccaggttggtcttaaactcctgagctcgtgatccaccctccttgatctcctaaaatgcagggattataggcatgagccactgtgtctggttgatttattttaatttaaataaaagcaactcgaggttagcatcatatcaggctactctcagttgtattctagtatctctcttgagtgtgggagtaagggatggagctgtagctagtttgctgagaactggacaaaaccctgaccactccctagggcgtgtgcctaggatgtgaaagatatgcctcctgttttcagacggcacccgtgcttggaaaggctgcttgccagaggtgttgaaaggatgccactgggctggtcctgcacaatggaagaccacatcacatgctccaagagagtcactccccagagcagctgcaggaagccacagctctgtggcctgggatccttgccacactgaatattagtgatagacattggagccgaggggatcttatgcttcaaggcagctggatctcttttttactggtcaaatcatacctaaggattgtctttcgtgtcctagagactttgatgagtaattcaacttttaaaatccaagtgaaggctgtggctagagaagcatgagctaaacctaaaatgaatgggaacattacagtctaacaagccttgagaattcaggttcacattccctaaagaaacaacatcctgaatgatgaaacaaacacacaaaccaaccaacaatttgtgatgtgagataccaaaacagacacccctttatcacctaagatggactgtaaggttaaggaaacaaagttacctacagggttagggttcggggactggctggcatgaccaatttctcaatttctatggctctaaactccctaataataggaactatcagccccatcctgtgatttacaacccagaccactacaactctaattggaatgaggaccagccttacaaacattcttttctgataagcaattgcagaccttaagccagtgtcagccagtttattagaggctgtgcacaaactgtctttgggtcctgtagttcaccttttgatgtaaagagccaaattttacctcattttaacactaaaaccctgccccaaagtgtacatgggatgtcacatacatatttacccattgcacatgcactcagctcccctcataaatatgtatatcttttcctccaaacctgctgaatatgtatgactccactgtgtgaaacagaccctgtgaggcatgaaacccaactgtccttcctctcttttgaagagagaccacattcagcatacaccgaagactatgtcttccgggtttgcaaattgatattgccaataaagctctcctttctgttatttagccatcacgatggtcttttgaatgataaattcacaaaagcaccaaatcattcaatatacaacgttgtccctgagcaaacacccaactttatcccttaaataacatttttgtcccgtgtgtaatttattcagttaaatataactattagaaatgaaagtgttcagtattggtggatcaataaaaaatttttatattctcactttgggtgggaattaaaaaaaaactggttcatttgctcccattaaggagctaatgtttatatgagaaaaatatctgggcaagaaaaagaaaaggcacagtgaaaaaagtacatcagtaaatacaatttagtataaagtatttgtgcacatatatgtgaattcatcagaagaaaagtaaggatcaggcctggtggcttgtgcctataatcccagcattttgggaggccaaggcaggaggatcacttgagcctaggagttcaagaccagtttgggctcaaaatgagaccctgtctctacaaaaaataaaatatattttttaaaatttaaaaattttggccaggcatgatggctcacacctgtattctcagcactttgggaggtcgaggtgggtgggttacttgaggtcaggtgtggtggtaggcacctgtaatcccagcaactcaggaggctgaggcaggagaattgcttgaacctgggaagtggaggttgcagtgagccgagatcgtgtcactgcactccagcctgggcgacagagcaagactccgtctgaaaaaaaaaataaaataaattaaaaaaataaaaattttttaaaaagaaaatgagagttacagacctgtagcgttggaagggtgaataagggaccttcagaggaggttttttgtttttgttttttatcagggtatttgataacaaccattaagaaagaagaaaggaggatgttcgaaggagaaaccatgtaaatacatcaagagtgttcatgatgggggtggtaagtgggagttagctataggaagaggtttttttttttgtttttttttttttgagactgactcttgctctgtcacctgggctggagtgcggtggtttgatctccactcactgcagcctcccccgctgccccgggttcaagtgattctcctgactcagcctcccgagtagctgggattacaggcacgcaccaccaggtccggctaatttttgtattttttagtacagacagggcttcaccatgttggccaggctggtcttgaactcttgacctcaagtgatctgcctgcctcagctgcctaaagtgttggaattacaggcatgagccagcacaaccggccaggaagaggtcttaatgttagaagacctgaggaatttaggtcagatggaataggcagcagtgggcaattagtcactacagatttaccaatcatgatctgacattttaacatttctagaggcttgtccacggggaaagtatagggagattcagaggatgaaaaagttgagattgggaagagaaggaagaagaatgtgccagaggttccaggaatgaacatagatagggtctgtgaaaagtttgtgaaaaaatcacacaaggacatcttattactaataaggatgcctaaggattacagtatgtcaggctgaggacgtatacagacgggatctctgaatactcatgagttgtattgggttaacattgcatgtcacaaatgaagaggtgaaagagtaaggggaagagaaaggagggtttgtacccagttctgtctaacctggacacctttagtgacaatgctgaactgcaaaggagaaaaagtgatttgaaaactttttttttttttttttttgagacagagtctcagtcttgctgtcttgcccaggcttgagtacagtggcgtgatcttggctcacggcaacctccgcctccagaactcaagctatcctcctgcctcagcctcctgagtaggggtgggattgcaggcacacatacacctggctaattttttttttttttgtattttgtatttttagtagagataggggtttcatcatgttgcctaggctggtcttgaactcctggcctcaagtgatccacccgcctcagcctcccaaagtgctgtgattgcaggcatgagccactgcacctggcctgaaatctttttttttaaatgagggaaataataaatttaatgttcattttgtaggtggaaatcagaagtacatgcaataggaattaacttgaatatgatgcataaagtttgaagcaaaggtgagtgatagatgaacattggtgatgtaactccggaagttgtctgtcataactgatgacttatccccatcatatgtgctgaaaactactcagatgaagttaacaacctgatattacaaaataagcatatatattttgtgtttataagaacctaataatcatctggagacttagtacttggggggtgagctatagatagccctgtgtatcagggttttccaaacaaacagaaccaatgggatatatatagatatataaagacacttcttataggaattggctcaggagattataaaggccaagaagttccaatatgtgccccctgcaagccgaagaaccaggaaatccagtgtaattcttgcatgtgaagctgaagggctgaagagtgtctgctggtattgaaggctcaagaacctggagctctgaagtcaagggcaggagcagatgatggatgtcccagcttcagaagagagagcaaatttgccttcctccacctcttttatgattcctatgctcagttaattgaatgatgcccactcacattagtgaggatgggtttttgatacccagtctattgattcaaatgctaatctcttccagaaatactctcacagactctcccagaaataatattttaccagctgtctgggcatcccttaacccaggatgggctaagagacaagtggacacataaagttaaccaccataccctgtaaatatggtatgagaagggatcgagtcatatttcatatcaagattattttccaatgcatagatgccttggaataatacttcttataaaataatgagtaacattttctagcacaagttccaaactgtgtaccatggaaccctagctcggtcatatgttgctcggtattgcatgcatacccgaaaagaattctgtaatcaagtaactttgagaaataagaggttaaacaaaattaaacaaataccttcactttaaaatgcatacaattctttaagatgataatctgcattttgaattttaaagagggtaggtagcttcagtatgtagcatcactccctctccctatttcttttttcttttttttttttttgagacatagtctctctcttttccccaggcatgatctctgctcactgcaacctctgcctccagggatcaagcaattctcatgcctcagcctcctgagtggctgggattacaggtgtgtgccaccatacccggctaatttttttttttgtatttttagtagagatggggtttcaccatgttggccaggctggtcttgaactcctgacctcaagtgatccacccacctcagcctcacaaagtgctgggattacgtgcacacacacctagctaatttttgtattttagaagagacggggtttcaccatgttgactgatctcgaactcctgacctcaagtgatccacctgcctgggtcacccaaagtgctgggattacaggcatgagccaccgcgcctgcctggcacctctccccattccttgtttttgtttgctgcaccaactcctagtgttgcacaaagcatgctttagggaatgtggtttggaagcattcgaatcaaacccttgaatttttttagacccttgtagaagtgaaggtttatagtgtacatttttgtcaaagcagatgggttcttttcactgaaagttgttttcacacatgaccttgaaaataaattaataaaaaaaaagtagaaatattaggctgacagacattttaaagtagggcataagatgccataaaaagccttttgaaagtttaaaataggagttaaagtgtgtgttatatggaagataccagattagagtctttgaatatttattatataaatgtgcaagtatatgaccagcttcttcccagtttgggggagtaatgggacggcattcagttcacatttgagactgcttctctttaaattttcgtaagtgaaaaggaagaaggatcactaagtttacaaagacaagtctcggaataagactttcgttcactgtattgcctttaatcatctggtgggagggccctcaagaagtggccaaggccctatgaagattggtgaagagtttcaaggaggagaattgaaggagacagctatgggattaattttgagagatgcctttgctgaaatgtctcataaaatatacatggagagcaagggcacaaggagacagagaactctctcggccaaacaataaatcagaatttccatagtttttctctgttagtccttattgaaaaatttgtctactgctaatggtgtcaagtagccctgccagccctcattattgtaccaaaaagcaaaacgaggaaaaggtttagggagctaggtctaaaaggaatatcatttctgtttcccaacaattagtgaaaacagattctgttaccaaaatcttgcagaaccaagggtcctaatacccactttattctggtgagtttgtcagtcgataaaaaatactaacaggccaggttcttttctcagataaacagtaaaataacatggttataaacagaaaaaaaatggtgaaaacacaaatcttggtgtattaggccattcttgcattgccaaaaagaaatatctgagactaggtagtttataaagaaaagaggccgggtgcaatggctcacacctgtaatcccagcactttgggaagctgaggtggacagataaccttaggtcaggagttcgagaccagcctggccaacgtggtgaaacctcatctctactaaaaatacaaaaattagctgggtgtggtggcatgcacctgtaatcctagctactcaggaggctgaggcaggagaatcacttgagcctcagagcagagatagtgccactgccttccagcgtgggccacaggatgagactccatctcaaaaaaaaagagagagagatttaatcagcttatgattcttcaggctttgcaggaagcctgatgctggcatctgcttggcttctggtgaggcctcaggaaacttacaatcatgatggaaggtgaagggggagtagggatgtcacatgaccagaccgggaacaagagaaagcatggtgccacacacttttaaacagccagatctcatgagaagtcactcatcacaaggacagcaacaaacagatagtgctaaacgattcatgagtaatccacccccatgatccaatcacctcctaccaggtcccgcctccaatactagggattacaattccacatgagatttgggtggggataagtacacaaactatatcattctgccccagcccctctcaaatctcatgtccctctctcatttcaaaatacaatcatgccttcccaacagtcctccaaggtcttgacttgttccagcattaactcaaaagtccaaagtccaaattccaagtccaaagtctcatctgagactcatctctttccatctatgagcctgtaaaatcaaaacaagttatttacttccaagatataatgggagtaccagcactgggtaaacattcccattccaaaagggagaaatcagccaaaagaaaggggctatagtcttcatgcaatttcaaaacccagcagggcagtcattaaaccttaaagttccaaaataatttcctttgactccatgtcccacatccagggcacactggagcaaggggtgggctcccaaggctatcagcagctctgcctctgtggctttgcagctgggtacagccctcatggctgctctcacaggttgttgagtgccatggcttttctaggcacaaggtgtaagctgctggtagatctgccattctcaggcctagaaggcaggggcccccttctcacagctctgccaggtcatgccccattggggactctgtgtggggtctccagcctcacacttccccttgtcactgccctagtagaggttatctttggaggctctgcacctgcaacaagtttctgcctgggcacccaggctttcttgtacagcctctgaaatttaggttgaggctgccaagcattctttaatcttatattctgtgcacctacatacataacactgtgtggaagcctccaagtcttatggcttgcattctccaaagtggcagcccaaactgtacctgggtccctttgaaccgcagctggagctggagtggctgggatatggagagcagtgttccaaggctgtgcagggcagtggggccttgggcctagcccacaaaaccattctttcttcctaggtctctgggtctgtgatggaaggagctgctgcaaaggtctcttaaataccttcaaggccttttccccattttcttggatattaccatctggattctttttagttatgcaaatatctctagcaagtggtttgctctgcaacctgcttggattcttcccatgaaaatgggctcagcttttcaaccacatggccagcctgcaaattttccaaacttatacgctgtccttcccttttaaatatgagttccagctttaagtcacttctttgctcctatatctgagtcgggctgctagaagcagccaggttaattcctaaatgctttgctgcttagaaatttcttctgccagataccctaggtcatcactcacaagttcaaacttccacacacccctggggcatgaagagaatgcagccaagttctttgctaatgcatagcacatgtgatctttgctccaattcccaataagttcctcatttccatctgagaccttggcaggcctggacttcactattcatatttctgtcagcattttggtgacaaccatttaaccagtttctaagatattccaaacttttcctcatcttcctgtcttctgagctctccaaactcttccaacctctgcccagttccaaagttacttccatgttttcagatatctttatatcaatgcccccattactcagcactaattttctgtgttacatcgttcttgcattgctgtaaagaaatacctgagatgggtaatttgtaaagaaaagaggactatttccctcacacttctgcaggctttacatgaatcacagtgctggcatctgcttgacttctggtgaagcttcagggagttttcaatcatggtggaatgcaaaggggaagcacacacatcacctggtgaaagcatgtgatgagcaagagagagagagcggttgggggtgttgccacacacttttaatgagaccagatctcatgtgaactcagagggagatctcacttatcaccaagggagtggcccaaggcattcatgagggatccacctccatgattgaaacatctcccaccaggccccacctctaacactgggattatacctcaacatgagatttagacaggggcaaatatccaaactctaccacctggttttcaggtcattctagagcactagcagctaccctggcttaaatcctgaaaagtatcaaatttatgtgtttttgaccgacataagaaaacaggtcaaagatttgcttagtccattgtaccatttctgccttaactacttgggagctactgggaattttctatttttaaaatcaggttgtatcaagattgtttggtgtttttcttttttcttttcttttttttttttttttttttgagacggagtcttgctctgtcgcccaggctggagggcagtgacgcgatctccgcttgcggcaagccccacctcccgggttcacaccattctcctgagcgcctcagcctcccgagtagctgggactacaggcatccgccaccatgcctggctaattttttgtatttttagtagagacggggtttcactctgttagccaggatgatctcgatctcctgacctcgtgatccacccaccttggcctcccagagtggtgtgattacaggcgtgagccactgcgcctggccctgtttggtgcttttcgaccaaaatctctaaacaactccaaaagccataaacagactaagctagaaaaaggcagacaaagatattagaaactaagcttgagtaactcaagtctttaatgctgtcttactagtctcagtaattcagcacctaggaaacatccacagaagacattttatcaatcaaaacaaagaagctcgggcaagcacagtgatgtgtgctcactcatagatagacttgtttttgaaattagtcttcagtgatattcattcagtgtgagatttagtctccataaaccgaagcacaacacaacttgaagctttactggacccttgggagtgagaagcagttctgtaatgtgtctgtgattaagtagcagtttcatcctgatttttcaagctcagagctctctaccctttcacatgcttgaagacaagatgttggacaactggcccagaggatgttttcctctcatttctgtaatcttctgataaggaaggaacgatgtgacttaacatgactctccttcaatctgaacgtgccagtgtaccttctttcccatcccactccatatatactctgtgtctgtcttttgttgttgttgttgttgtttgttttttgagacagagtctcactctgttgcccaggctagagtgcagtggcataatcatggctcactgcagcctcaacttccagggttcaagcagtcctctcacctcagtctcctgagtagctgggactacagttgggtaccaccatgcccagctaatttcttcaaatttttcatagagatggggtctcattatgttgcccaggctgatctcaaactcctgggctcaagcctcccaaagttcagggattgcaggagtgagccactgtgtctggcctccgtgactgtctgaagtctctctttcacaactctcttacagttcctgttagttgaggaaaaaaaatctggaattacagtgtttacaactgaaagggatgaagtagtcatttaggccaagtctttaatttgatgaggacttactggagagccagataaatgaagtcccttgcatatggtcatatgaatatttattggcaaagcttggcctttgtcctcctgacttccagatctcatttcatcttgtggtgcttccagcatctggccaccttgctagacctgagtcataaaagcaatggggcgctaagaccagccatactataggaagtggtgacagtttcctcatttaaagttgggttgtctttctagaatcttagagttggaactcaactcagaaatcacctgtttgatcctcccacaaaggcaggtgtctctcttgcaatattcttgagacaatcatctggcttctgcctccttattttctattatcgggagccagcttcaggaaataaaacatttcactagaatttttgtgttgttacatttagctaaaatttaccttctcttcacttctgtccttacatcccaacactgccccatgcagtaacaccaaatgcaaagacagactgtgctttcgaccacagggcactcctctagaagtgttaaaatacttatccagtatttcctcaagcttctctttttttctcaaagctaaatatctgatttttctaaactgtgccttataggttacagttgctggatcccttgtgatgctgaactttggatgtattccttttggcaaaatgactgtatcctacttatccaccaatttgacagatatttaataagcacctactaagttgcaggagatttaaaaaatacaagcatgtaaataagaaaatatacaaagtgatatataacaatacaggctgtggagaaaaattaagcagagcaaggggagatggaaaatttgtgtatggttaggagcttgggaccttgctattctattaatacagtgatcaggaaaggccccactgatgtagtgagctttgagcaaacaagtaaaggaaatgagggaggaagacttgcaactgtttggggagagaggatttgggcatagagaatagctcctgaggcagaaataagtctgatgtgtttggagaacagcgaggtggcccttgaggctccagtggagggcgtgagtgggagagtgggaggaagtgaggtcagggaggttgttatgggctgaatggtgtctccccggaattcacatgttgaagccataagccccagaacctcagcacatgactgtatttcgagataatgtctttaaagacctaaaatgaggtcactagggtgggccataatccaatatgactggtttcctcacaagaagaggaaattaggacacagatgggcacagggggaagaccatgtgacgacacagggagaagagagccatctataagccaagcagagaagcccccagagaagccaatcctgctgacaccttcatctcagcttccagcctccagaattgtgagaaaataaatttctgttgtttaaggcatccagtctctggtactttattatggctgtcctagaaagctaacacagaggggaaaagggccagatagtataagaccttgaaaaccattttaagttctttgagcagaaggggagccagtgagggtttcggagcagatgaaggtgatgactgggctcgtattttaaaagcatcactctagcttctgtactgaaagcagtctatggggaggcaaggacagaaggaagaaaaccaggaggaggctattgcagaaatgtacatgagggtggaaggtggtgaggagagggaagttttggaatatattctgaagttagagccaaaaggattttctgatgaactgaaattgtgatgtgagagaaagaaaggagtcaaagatgacccaaggcttttggccacagcaacttggagaacggagttaacattcattgagatggaaagaactgtaggagcagcgggcttttttttccttcttcaacttttaagttcaggggtacatgtggaggatgtgcagatttgttacataggtaaacgtgtgccatggtgatttgctgcacagatcaacccatcacataggtattaagccctgcgtccattagctatttttcctgatggagcagtgggttttaagggggaggaccaagagttcagtatggacacattaagattaagatgcctactcatctttgagtttgaaatgccagctaggctgttggatgcatgaatttagaattcagaggagtggtcagggtaaggatacagatggtactgagtgagatcacttagggtgaaatgaggacaaaaagaaggctttggaggctggggattgtggctcatgcctgtagtctcagcactttgagaagccgaggtgagtggatcacttgaggccaggagttcaagaccagcctggccaacatggcaaaaccctgtctctaccaaaaatacaaaaattagccaggtgtggtggcaggcattgtaatcccagctactcagaaggttgaggcatgagaatggcttgaacctgggaggcagaggttgcagtgagctgagatggcactactgcactcctgtctgggccacagagtgagacctggtccccctgagcacccccccaacaaagtaaaggatttgggattaagccctagtgtacttggaaatgttgaggttgttaagatgagcaggaaaaagagaagcaagcagaggaggggcagcgagtggagtaggaagagaaagagggtggtttccaaggagccaagtcaagaatgtgcttcgtgaggacagaatgattactgggttgatgctgcagatactgtgtgtcaaataaggtaaggactgcattgtatttagtgatagagaggtcattgctgacactgacaagagccagttcagaatggtggggacagaagtatgatttgagtgggctcaagagagagtaggggaaagaaatttgagtccagcaatgattaaaatattctttgggaagacttttgctgtgaagggagcaaaaagctgaaggtagctaaagagagataccaagagaaggtaattttattattattttttgagacggagctcactttgtcacccaggctggagtgcagtggtgggatcacagctcactgcagcctcaacctccttcactcaagcgatccttccacttcagccttctgagtagctggaactacaggcacgtgcaccacacccagctaatttttttatgagcttgagcctaggagttcaataccagtctgggcaacatagtgaagccccatctgtacaaaacaatacagaaattagtgcttgcttcagcagcacctatactaaaattggaatgatacggagaagtttagcacagcccctgtgcaagaatgacacgcacattcataaaacatttcatatatttgtagaagcacataggaaaaaaaatacaaaaattagccaggtgtggtggtgtatgcctgtagtcccagctacttgggaggctgaggcgggagaatcacctaagcccagaaggtcgagcctgcagtgagctgtgattgcaccactgcactccagcttgggagtggagtatcgcccagctggtcttgaacccctgggctcaagcgatcctcctgcctcggcctcccaaagtgcttagattacaggtatgagctgccgcacctggcaaagaggctttttttaattgaatatgtgaaaatatatttgtatgcagaggagaatgattctgtaacaaaggaaaatggacaaagcaggagaaggaacaattgttggaacaatgtcctagagtataagagagagtggcacactgaatacaagcacaggagttggtcttagatgggactgacatctctagctatattaccttatagacagccacatgtagctatttaaatgtaaattaatttaaaatgaagacaattaaattttttctggctgggctaggtggctcatgccacctcagcactttggaagcactttggaaggtcgaggtgggcggatcacgtgatgtcaggaggtcgagaccagcctggccaacatggcaacaccccatctgtactaaaaatacaaaaattagctggatgtggtggcatgcccctgtaatcccagctactcgggagcctgaggcaggagaatcgcttgaacctggaaggcggaggttgcagtgagctgagatcgtgccactgcactccagtctggaggacatagcaggactccatctcaaaaaaaaagaaaaaaaaaatccgttgtgctagccatatttcaagtgttcaatagctgcatatggttggcgactacagtactagacagcagcaacaaagaatattttggtcattacagaaagatctgctgagcatgcctgagctgagaaatgagggaaggcagacatatgtatgagcgcctatgcagagaggtgagtagatgtggttgcggggagcttgtggaaagtctttcctgatttcttctgtttctcactaaaggctacttaggagaaggacctggagctttgaggaaaaggtgcagactatatctttaggagatagagagagtgaggggacacggggaaaatggcagaattgcagaacaacttttaagatccacttcaggccagcacagtggctcacacccgtcatcccttttttaaaaactttgagacagggtcttgtgctataacctagactggagtgtggtggagcgatctcggctcactgcagcctcaacctccttgactcaagtgatcctcccacatcagcctccactacacccgactaatttttgtatattttgtagggacagggtttcactatgttgcccagactggtctcaaactcctagacttaagcaatctgcctgccttggcctcccaaagtgctgggcataagccaccacaactggccacacctgtaatcccaacactttgggagaccgaggtgcgagaatcgcttgaggccagttcaagatcatcctggacaacgtagtgagacctcttccaaacaaaaaagaattttaaaagttagtcaggtgtgaccgggtgtggtggctcatgcctgtaatcccagcactctgggaggctgaggtgggcagatcacaaggtcaagagatcaagaccatcctgggtaacatgttgaaaccccatctctactaaaaatacaaaaaattagccacgcgtggtggtgggcacctgtagtcccagctactcaggaggctgagggaggagaatggcgtgaacccgggaggcggagcttgcagtgagctgagatcgcgccactgcactccagcctgggtgacagagcaagactctgtctcaaaaaaaaaaaaaaaaaaaaagtcaggtatggtggttgtattagtccgttttcatgctgttgttaaaagacatacctgagaacgggcaattaacgaaagaaagaggtttaatcaacttacagttccacatgcctggggaggcctcacaatcctggcagaaggcaaggaagagcaagtcacatcttatgtggatggcagcaggcaaagagagagcttgtgcagagaaactcccatttttttttttaagccatcagatctcatgagacttattcattatcatgagagcagcacaggaaagattcacccccataattcaatcatttcccataattcaatcattatggaagctgcaagatgagatttgggtggggacacagaaccaaaccatatctgtggtgctcatctgtagtgctacctacttggggggctgaggccagaggagccctggaacccaggaatttgaggttgcagtgagctatggtgggccaccacactccagagccagcccatctctaaaaataatttttaaaatatccactttaggttagtgatctctaatttagggaaaccaatcagcatgctgtgtagttttttccaacttatgttcactggcatgaatgcactgttacagtaggtagaaagctggggctagtccaatgagtggttctctatcctggctgcatgttagaatcacctgggtgagttatttaaaaaaaaaaaaaaaaatcagaagcctcatccttgtagccaaaggatctgattgaacattctgaaaatggggcctgagcaacgaacaatctatttaaagctcccaaggtgattctaacacagacatgctttttttttttttttttttgagacaaggtctccctttgatgctcagactggagtgcagtggcgccatcttggcttaccgcaacctcagcctcccaggctcaagcgattctcctgcctcagtctcctgagtagctgggattacagacgcatgctactaccacctggctaattttttttgttctgtttttttttttttttttgtatttttattagagatggggtttcactgtgttggcctggctggccttgaactcctgacctcaaatgatccacccacctcaatctcccaaagtgctgggattacaggccagatacgtgtttaagaaccacggagttagagtaagaatgtggaggaaatgtgcagagtagagatgaaggatggggaactgtgttactgatggatcatgggttccacaggtgcaaagaaaggcactcaggatttgtgcagggatgggggacgggatgagattgagaagtgttcaaggctgatgagcaatgagagatgggctgggaatctagggcttcttgggtgacaaatacaaattgggtaaagggcacatggagatttgccatgctggtctaaatcagcacaatcaacataaatgtagtacagataattttaaatcttttattgaccttactagaaaagaaacaagtaaacttagtttaatagtatattttgttatccaatgtatgcaaaatattatttctttttttgttgtttttgcaaatttcttaaaaaaaaaaaatacagacagcatcttgctttgtcgaccaggctggtctcaaactcctggcctcaaactcctggcctcaagcagtcctaccacctcagcctcccaaaatgttgggactacacaaatgagccaccacacccagccccaaatatcatttcaacatgcaatcagtataaacattactgagatatttgtcatccttgtttttttatagttagtcttccaagtttgtgtgcattttacacttcaagcacatcccagttcagagcagacacatttcaagcgctcggtaaccacatgtgcagtggaccatgcaggtctaggtggtggtgatgaggtcgcaaatgttggatgatctctacagaacattcctttcagaatacaaacatactataatatactcaatcttaaggcagctgtatatgattatatagaattatgttcttatttaacccaatatagcttttccagaaaagtatcatgagagtcttagtcacatgctctgctaaagtccaaaaattccatgttggccacacttatctaatagaaattagtctggcatgaatttcctggtgaatccgtgcgagcatcagcttccagaggtgtcagtttcttttttctgtgtattctcatgccagtcttttaacaatccagtctgcctgcttgctttcatttgtgtggagctgatcttttcttattttctgacagttgaagttacttactctgggggagaaaggacgatgggaaaatgagcaaccacttgccatttaagtggtagcaaagctggatttgatttattagacctgatgctaggattccagattattataagcaagaaacggcttgcattgcttgtggaggatcacgtgacaaaggattgaccaatcgaccatggaaataacttgaaactaagttgccaaagagggggtggttggaggacaatgtctagataaaagggcaccaagaaaaatgaaggaaaggatgttatggagagaaaagcaacagagaagagtgccctcacacgtgctcgcagaaaaaaatcaggaagtcgactggggaaaaaaagtttgtgtggatgcttctctgtctacgtactgatgctcagagtgggaaagaagcaatctggtattttaacacagggaagtagacatggcttcatagatgacaccaagtgttggtagaataaaactgataactagagttaaggaatgagagtatagttctttttcaaaagaaactgacctgggagtatgctcttttgcttgcccagctggaaaaacatttaaaagctccctcttcaaacagacagcttgagtagccccagacccaggcgaactctttgtcattgtccatgccattagggcaggattttaaaacaggattctcacatcactgctctacgttggaacactgaatcagattatctttatcagacagtctacactctattccccctcttgttctggttttatgcatttctgtgctagactgagtacataatttgtcaataaagcacggattttgtgaatcagacacatccatgttaaaccggggtccatcatttcccacatggtgacatcattcctattagctaagcttagtctctatcctcctctacaaaatgaggataatgcaacatactccctggggctattatgaggctcctggggctattatgaggcttagggatgacatctgcgaagggcttggcaccaatgggcattcaataaatgctagttgggtatcgagactgtggactcaatttagacaaagatttttcatctggtttagctggttattatatatgacaaaaagagatcacaatgtgatagttggctaaagcagtctgagtcttaagtgaattctgctcagggccttaaaaatagacaaaggaaaaatgagagccaggctgggacatcttcaacaaaagtttgacatcattcttgtgaaagtattgggaggattctgatgggtggcctttagtctgacatatttcagccttcactctttctcatcaccttattgagctataattcacataccgtacaattcactcatttaaactgtacaatttaatagtttttagtatattcacagaggtgtgccaccattgccacagtcaatttgagggcattttcatcacttcaaaaacaaacccctctgcttctctctcccccagccctaggcaaccactaatctacattctttctctgtagatttccttgttctgggtattttatataaatggaatcatacattatgtggtcttttgtgattggcttctttcacttaacataatgtcttcaaagttcatccatgttgtatcacgtgtcagtacttcatttcttcttatgaccaaataccattccactggatggtataccttatttcatttgtctgtttgtcaattgatgggcatttgggttgtctccaccttttggccattatgaatactgttgctgtaaacatatgtgcataagtctttgtgtgggcattaaaaataaaaaatttcctttgagtatatgcctaggagtggaattgctgggtttcagccttctcttggtttttctgttacagggaagatcaagagttaaggactgtaccattatccccctaaaagactttcctgtaagaatcttaagttaataatgactgagcacctactgcataccaagtactattgtaggcactgggcagcttcagtaggcgtatcggattctagtctctcctgggtcaagatggagcctgacactagtgacaacttttattcacagcagtcataattgtaggctaccttatgggaacatctggtatgcccaacttacagggttgctgtgatactttgagtatcatgctttttctatttacttgtgtatgtctgcctttagctagaggcagtaaatgtggatcaaaaataaagatgtggggcccggcatggtgactcacgcctgtaatcccagcgctttgggaggccgaggcaggcagatcacttgaggtcaggagttcgagactagcctggccaacgtggtgaaaccctgtctctactaaaaatacaaaaattagccaggtgtggtggcgcatgcctgtaatcccagctacttgggcggctaagacaggagaattgcttgaacctgggaggcggaggttgtaatgagccgagattgcaccactgaactccagcctgggcgacagagcaagactctgtctcaaaataaataaatacatacatacatacatacatacatacatacatacatacatgcatacatatatgcataataaagatgtatgactttctttattgttgttgttttgagacaggatttcactctctagtccaggctggagtgctgtggtgtgatcctagctcactgcagccttgaactcctgggctgaagtgatcatcttgcctcagcctcccagacacctgggactacaggtgcacaccatcacggctggcgaatttatttatttatttattttttagagatagggccttgctgtgttgctcaggctggtcataaactcctggcctcaagcgatcttccactttgacctcccaaagtgctgggattgcaggcatgagcctccacacctggtgcagccgtacagctttcaaaaatgaagagaggaactcgtgggcactactggcatacatctaagaataaaatgtgaacaatctggttgttgtgttataacaacttggttaatacaatatgatattgatgagatgctcccaactcatcttggagtaactgaatgatgctacctgaaaggtagatatgagtaggaagtggaggtatacaggggctggagtggggcaaggaggctttccaggcatggagaaaagtgtaaactaagacacagcttatgtgagaaacaagcatagtacaagtaatctagtgttgctggatcataagggcttctgggataaagaatcttcaaagaaggagagatataattgcttaacatacagctcaccaatgggattatgcaatgatttataactgtcccctagatagctgtgtggcatcagacaagccattaacatctctgtgcctcatttgtcatcaaatgctgcatgggaataaaacgtcatgaattatctcctttctaaagtgacacatgaattgctaaaaaaaaaaaaaaaagaaaaattaagttctaaagaactttctttttttttctttttttgagatggagtctcactctgttgcccaagctagagtgcagtggtgcgatctcggctcactgcaagctcctcctccagggttcaagtgattctcctgcctcggcctcctgagtagctatgactataggcgcccgccatcacgcctggctaattttttgtatttttagtggagatggggtttcaccgtgttagccaggatggtcttgatctcctgacctcgtgatccgtctgcctcggtctcccaaagtgctgggattacaggcgtgagccactgcgcccaggctaagaactttctaatattgtcctatatgtagccaagccttgtgcagataaagattattattgccgtttgggacaagtggatgctttcagagagtcttagttgaggtttcctagaggctgaacctgagatagagatccttatgcaagtggtttattgaacttactagttttggaagaaactagtaagaaggtgagggaagcagaaaagggcaggaggagaagcaaatgcaaatgttaaaatagaaggatttaaccactttcaaaaagagggcactcatttacaaagtagtaaaggacacacatttaattatataaaaatgtgcatagatgtttggaaattttgacatgtagtcacagaataatgtgaaaattatatacaattattgacattcaaatagcagaaacatagaaagtcaaaggttggccatggatgaccctcatcaagggcaaatgtgtacacatctatgcacttatatttaatggcaatgaacttgtcagctacagcctgtttgacatttacagaatgatgtgtgataatgggattgatgaattcattagcattatgaatcatacataaatagaatctttagcacattttattaagtgtgaactaaaatatgttgtttggagaggacaaagattacaaatgttttaaactgggttcccaaagggcaaggaaaattaaacagtcagattccaccctaaatgatcaaaaggtggaatgtacatctcagtcacgttgtgctgatgtggcagtagggccagaggagttttggaaaatccaaagaagcacaaagcttgagtatgagcataaaggaaaacaccaagcgctgagtcagacactggacaagaagttcttttctgatttttcaaatgaaaagactgtacagttgagattaaggttcattaatttattgattcaaccaatatttagagagcacctcttacgtgctgggtcctgtggttgttgctgcagttacagacatgaagaggcaggaatgagctcccaagccaagtatgcaggattgtgtcatttctcgttccatgctttttgctaatcatgtctgggggtttataggctgtgtctacatttgtgtggtttcctagagatttcaaatattaaaaaatatccaaaccccttcccattgccttaaactcttcccttaattcatattccagaattggcacagggaaaaatggatctcttctttcccccaggaaaaaaaccccacaagcttatagttatggtaaattaattggtgaatattcttcattaactattctgtatcttaatttttttccctgaaaaatgaaaatgttacttataccactgggagcattttgctgattattagtatccaaggtataaaattttttgagattctgggaacaagaactcccccatggagagattaaactaccttctcttatacattatagagtttactatcttgatttatttcttcttgttgatctctaatccatccaataaccatagccactagtaattgtgaatatctttttattatatcgggtttcttgtaactttgaggattttgttttagtaaattaaatatattatttgtacatgtaattttgctgcatagaacaactggatttctggataagtagcttgaatgttatgtcctagagaataggagtttattacttgctaatatggcttattacattctgatgaatattttgactatgatctgagttgaattgataggaatacattttcgaagtacttaaaaattatttatggtggttcttttgtagtgttttcctttttataaaaccacactgtctgagaagaactctcttacttctgtgtcttaacttgtgggaacaatttatttatttatttattcatattagagatggggcctcataatgtttcccaggatggcctcaaacttctaggctcatgggaccctcccgcctcagcctcccaagtagctgggcctacagatgcccactgctgtccccgactatctatatgaattatctttatcattgaaaatttaggccaggcgaggtggcacatgcttgtaatcctagcactttgggaagctgaggcaggtggactacttgagcccaggtgttcaagaccagcctgggcaacatggtgaaatcctgtctctgtgaaaaataaaaaaattagtcaggggtagtggtgcacacctgtggtcccagctactcaggaggctgagataggattgcttgagcctgggaggttgaggctgcagtgagctgagatggcaccactgccttccagcctgggtgacagagtgagaccctgcctcaggaaaaaaaaaaaagaaaaaaagaaaaagaaattttatcaatgtgtttgtgctggtgtcagtttaaagcctatagagagtcttggaatttatgggatgttgaatttttaaaaattcatttgtattaagtggactttttataaaagagtaaatacctaattaaaataatattttatctgatgttaccaaagagttcttcatttcaacgttccatccctgagtaagttaacttatgaggaatgaattatattacctagcaacctccatccatcttaccacattgttaaaagcctatattctgcaaataattcacgtaatgaaacaataggcataaattaagttatacatttaattaacatatacataattaaattatatataccaagaaacattaaacttttaaacaattataaccaaattcattgctcatttcttctaaatcgatatttacatctttattgttaatttctaagaaaagccttaataagaaaaataacctaggagtatcttgaattagcaaatgtatgttttatagaaattctacattttatagattctatcactgcttctacagtacatacatttttatatttatggattcattggtatcctataaatagcctggatttttaatataatttatactactagagtataaattatactctagtataatggttctcaggtgcgcatatcagaagacaaacacagagatggttgacattgacatatagcagacttttatccccctaaaaatgcattttttttagcaggttcaaaattggaagcatgaattgaaacaacacagaaataacatgtttgcttacagtggataaattttgtactattttatagaaaacctctacaaatttaagacaagttaccgagcttgttgacaagttatgaggccatatgaaaagcaaacacacaaacaacaacaaactaggcactaagaaaaagtaaaaggaaattaaagttggtcattgcaatttaattaagacaatagtttgaatgcaaatgaagacataagacaaattcaatggaacattagaaattgtcttgcttggtactgtagtttatataagcagaagcggagacatactgaggttaagttttcatccaaagtcaccattagattgtggcagagctggctcctgtctcttgttgagtcttcttttcactgcctgacattgcctcttataaacaggacatggtgccagttaattataattgcttaagaaaaagcaattgaaaaaatggtgaatggtaattacatatgggctgaaataacattgatataatcaggaatatttgggggaggaaacaccattctagaacatctatttcaaccttggcaagctggaatgacaatctgcaactttatttttaccagttatcacttactggtataatgaaacaaatgctaaccgtaaaatttaattattaaatcaaatattaaaataatttataaacatgtttaaatcacattgcacaaaggaaagaaaaggggttgtatcattttcaggcataaaatcatttccttcttccttttaatttgatgttagaccagcttttttcatagtcaaatttgtacggaaatgcccagagagggcaaacaaggagcttaacagatgtcattttgctattctgtgaagctaaatagaactgtagtttattgaatgatttctcttacttctacttctgcttgaatgtagattgggggatggatagtagctgagtccaatttaatttgttcaattactcaccatttgatttatttatatcatatgataaattaatcagtttgttttaatctatactctgtatagggtttacaataagaacatcatttaaagtatggagtgcaactcttacaggttatatatattcattttattttacgaaaatttaatgtcatatacttatgcatttaataatatataccaaatatttataacaattcatcaagcttgacatttttttaaacaagaataaaatttcaagaaagttggaagaaaatacaaagaatttttgctccctctcctcatccatttgaaagcaaattgccaatacgatgccttatgaccccagaatgcctcggtagattacaaatgaagacactatcatacaacaaaatacaaccattgaaatcaggaaattaaccttgatattattaacatcaagcttgccagttgtgtagaaagaggatccagtttagaatcatgggctgcattttactgccctgtctcttaagcatttgtaggctttggaaagtttaaattttttcttgagtttcataaatttgacaattttgaaactcatagcctagatattttgtggactatcacttaatatggatttggctgattttatctcatgattaaatccatgcatctttggcagggatatcacagaaataatgctgctccctcattgcatgctgtctgtggtgcatgactgtgacttgttcagttactgatgatgcctctgtgataactgggttaaagtggtgattgccaggtttcttcacagtcgtttactctttcctctttaagaaataataagtatttcatggtgaagtactttaaaactctgcaaacatctcattcctcttcaaactttcatgttattcatttctttctttatatcttttctttttcttttctttctttcttttttttttttttttttttgagacagagtttcactcttgtcacccaggctggagtgcaatggcatgatcacggctcactgcaacctctgcctcctgggttaaagtgattctcctgtctcagcctcctaagtagctgggattacaggcacccaccaccatacccagctagtttttgtactttttgtagagacaggatttcaccatgttggccaggctggtcatgaactcctgacctcaggtgatccacctgcctgggcctcccaaagtgctgggattacaggcatgagccaccacacctggcctctttctttatacctttatagatttgtggtctacttatttaatggactaaaatccactactatgattatttattttaatgttccaattgttgctgtgggcaccactttgattgcttttataatcttttgatatttctctattattctttaagtatttcctgactttctggtacagcaaaagattctaggctcattttgtactttttctttcccatccaggaattggtcattttgctaaagggtcctgtttctttgtaacgagaatagtatttagaagccaagatttggttgctaaatgtactcattactcttggggtgccactgcctccagactgtttcagaggacaaaaactaaggaatatataataatatgcagacatgcacccatatatatgttacttatatgtctacatttatatacatttataaattcataccaattccttccatttcagttcaataccattgagttcattctatttttctttcatttcaatatttgtagctttcttctctgacagttgagaaacctggtttgccaattatactgaatatatttatttatttcatcacacctgtttccctccaacagtccgctatatgtggctaagcttccattgccattctactctccaccatccacgggtgctgttgcattctgcttaggctctgctggcctcggccaggccatccctccatgaagatgccgtctttttttctttttttgagatggagtctcgctctgtcgcccaggctggagtgcagtggcacgatctcggctcactgcaagctctgcctcccagattcacgccattctcctgcctcagcctcccgagtaactgggacggactacaggcgcccaccaccgcgcccgactcattttttttttttttgtattttcagtagagatggcatttcaccatgttagccaggatgatctcgatctcctgactttgtgatccacctgccttggcctcccaaagtgctgggattacaggcatgagccactgcacctggccttgttatggtgcctttttatttctttgctcctaagaaatagtcctggactttgtgatgctaccttactgtaacatcaatgttaatgcttttaaatattttccacaggtgttaagtcatttattactttactaagtcacagagtgccatacattttatatgaaggatagggatccatttcctcaaattataactgctagtaagacagaagcatagtgtgatggtttattttaggtgtcaacttgactggattaatggatacctacataactggtaagacattctgtctgggtgtgtcacaccaatctcttagatggactaaaccgggaagatccaccctcaacacaggtgagcaccatccaatcggctgggggaccacatagaacaaaaaggcagagaaaaggtgaatttgatttctctctcttctggagctggaacaccctcttctgctgcccttggacatcagaatcccaggttttccagcatttgggctccaggactcataaaagaagcagccctctgtgtaatcaggctgtaagcctcagactgagagttacatcgtcagcttcttttgttctgaggctttctgacttgggctgacccgtgctgccacctctcctgattctccagcttgcagactccctatggtgggacttcttagcttccatgatcatgtgagccaattcccctaataaatttcctgttatctatgtaactatctgccattggcatccaaaccagagtgattcactcttcaataaaggctgaatgaagtgagaccttctaggttacattcccaggaatttaggtactcttggtcataagatgtttatggttgaaggaacaagttaattatgctaattaagacccagaacttaaggaaatgtcctgatatccagatatcttaagaacagaccaggcaaggtggtgcacacctacaatcccagcacttttggaggctgaggcaggtggatcacttgaccagactgggcaatatagtgcaactccatctctccaaaaaatacaaacattagccaagagtgatggcacacacctgtgaccccagctacttaagaggttgaggtgggaggattacctgagtatggggacatccaggctgcagtgagccatgattgtgccactgcaccccagcctatgcaacagaataaaaagcattcttagtttaggaataggtttcgctttaaagattatagtacatccataaattcttgctgatatcaataggtaaacaaaagaagaacaatactaatagactgttacaagctaatcacaagcctttgtataataataaagcacattattcttagttctaacattgtatataagcaagcattatgtttgacgtaggggcgttccttctctcgctttctgaggatgccctactctgtaataagagtagtctctagtaaactatcttaatttcactctactctgctactcacactgaagtcattcctgtctgaaatccaagaacccactcttggggtctgggacaagaccctttttctagtaacatctatctatcttctatctatctcccgcctattggttctatctctttggagaactctaatacacacagtaaagttaagattaacacacagaagcaggtcatggattattcaggtggaaccacaggggacatttggttgggattgcatgattaacgccctaccatgtcatgtcattgatcaatggtcacttctttcctgagcattagcatgtctctaagatttgctcttatctatcaaatgaatgcagaatgccattcatgtgataaaccccaacaggtcccacagaattttcacagtctattgtgtcaagttgtacttaagagagattttttactttatggatcaatgactggatagatcaaaatgaatcctttaaagctatcatattttatcagtttgctgcagttgtcttgcaggctcaatgaaaccatgtttcctagagtccaaaaatctgggaggtgaccatcgactcttctagatgagctggtgttctctgcttaactaactgctcaagttcattccatgagggagaaacctccctttttgactttgaataccactgctgagaattgtgcttctatttcactttgtggaatgcttgaagtgatttttacagaattctttttggaaatgttaatacttgtggaacaaatggcttattgttaaacttggagctggaagacctggatttgaatgcggatattgccagttactagcagtgtgacctcagtttcttcagtaaaacaggatattatcattgtctgacaaagttttttgggcctcagttaaaaaaatgttaagttaaagtcatttcggttcttgaaagtgccaagcaaatgtgaggcactattagtattttgtaaaaagccatttctttaaagggaagacaattcatgaagaaaaaattcaaatgaaagcaaagtaataaataaaattaccgtaagaactgatgagagaattctgattttgtagatggaaatttgtttttgaatttaatgaatatacatatatttactcctttaagtagttattttatgtttcaaaaagattcaaacattttaattgcaaaaagtctttgccttgctttaaaagcaagtttaatttcagggacaatacacctattcattacccaaaccattcctaagcagtaacagccttaagagcctattaatgtaagggggggtgttaagtcttattcaaaatgaattgaacccctgactccaagtcagctagtttatattctaagacaatgaaaattaagaacaatgatttagcgactcgagaagactcaatctaatatgatccgaaaaaggccaattatcgtaactcttttagccaatattaacttctgaatgtgtcaaattctccatcttggaaaaactgtgttgactccagcagacataagaagttttcttctctcattaacaaaccttctatgttagaccagaggaagaagcatttaactggcattattctaaaaataatgaaacaattcaacaaatacatattttataatgattttgtattaaaatagaactggttttacttaattggttgtaatttaaagttcaaaatcttaaaaatatatttgttgtaaaaatgtcaccaggttctgtgttatctcttttcaattttccttgaaagagttgctcattatgatatttaaattcttgtgtcttacatttgaaaattagtactgatttttcaatacaaaaaatcctatcgaaacagcttgaaatcttagcagtctttgtacttttcataacatattttattatacatattttatatacaaataaataattaaaaatatataaattttatttttaatttttttgaaacagggtcttgctctgtcacccaagctggagtgccatggcacgatcttggctcactgcaacctccacttcccaggttcaagtgattcttctgcctcagcctcccaagtagctgggattataggtgtgcaccaccatgcctggctaatttttctatttttagtagagacggggtttcaccatgtaggccaggttggtcttgaactcctgacctcaagtgatccacccgcctcagcctcccaaaatgctgggattacaggtgtgagccactgcatccagctctgtattatatactgtagtagtctgtacaaacaaaagcatgtatagaattttggcattcatgttgaaaatatgaccacagatttcttcttaggtacatgggaagattgccttgtattctagttttaggtttcagcaatttcaccactgaccattttattgaaatcatgtagtgctgtaggtagtcagataatgagatgccacttaaaaggcctgaaatacttggggttgcataatggggatgtatgtactacgttagaggctaattccaaaatttggggaaagactaataaaatgtttctcttgtcaactgaagaatgatgaggttcataaatttagaaaggtgagctttgttttttataaagaattgcagccctcgggtggccattctgacagggttggaagtgtagcctcctgccagaagccagaaaccggcactttgagggagggaagaataagacaggaatttatgctgaatgcggtggttgaatatacatttttgtttgtttgtttgtttgtttgtttagacagagtcttgctctgtcacccaggctggagtgcagtggcacaatctcagctcactgcaacctctgcctcccaggttcaagtgatactcctgtcacagtctcccgagtagctgggattacaggcacccaccaccacgcctggcttatttttgcattttttaatagagatggggtttcaccatgttggctaggctggtctcaaactcctgacctcaagtgatccatctgcctcggccttccagttgtttgtttttgaggcagagtctcactgttgcccaggctggagttcagtggccccaacttggctcactgcaacctctgcctcccaggttcaagtgattctcatgcctcagcctcccaagtagctggggttacaggcgtgtgtcaccaagcctggccaatttttgtatttttagtagagacggggtttcgccatgttggtcaggctggtcttgaacttctggcctcaagtgagcctcccgtctcagactcccaaaatcctgggattacaggcatgagccaccatgccccacctgaatatacatatttaatcagctataggaaaaggcacaaatatacgaaaagagaaacgtgcacatagttgagcttcatgcctgtccatgggcatcatgttcaaaatatggtggcattagtataatctgaggatggagttttcagccctctgactcaaaaggtgaagcaggcaacacaaaaaccctcactatgcatcctctataaaccggccagagccacttcatgttcggtgttcttttgtcaggaaggaaagctgagtggtcgttttgtcaaaactgcaaaaggaaggatagtcacaaggttggtggaaatcactggcggagccagtctttcccaatggctggtttctgtttaacccttaagaaagaaagcctcatggctgttagcaaggttgcaggggaggtgaacgaggcatgttcaatcttccatgtcatcatggccaggagcacagttttcaaggtttctctgcagtaccctttgccaagagagagttctattcagctggttggggggctcaggattttatttttatttctcactcttaaggggaacatcaacttagagggtcttgtccatgagactgaaatgtcttccagttgtcttcgagaagaatgtcctcatttgagtttccctgaaagcagagggcctgagacaagtatgtgggctcaggtagtttctttgggaattaatcccaggaagcagaagtgagagagtagaggcatgggaaaacatggagttattgagctagctacccctgtggaaaactggggctccattctgttgaagagcttctaagaaactttgtggaatccctcagacatgtttcagggaaggacagggagactgggacacccgtctattaattcagtctcccattgattgtgggttttgctagaggcactttggcaccatgcacttccaagtgtgcctgtttaggggagaggcaggctgagttgctttcagtgactgcagagaaatccaaattgtgagatgccacagcacagcttgaggtgggatgctggttgcttgcacagacttgtccttcgcagcagtgctgaaatctagtggccaagggaagtggttgaggcaccacaagtgtctgctacagataagagaaagcaaatagtataaaagaagttattatccaattatttctaatagagttgagggagtgtcattgctgtagggtcatggtctgtacagagtggtgtatgagatgaggacgtgctaccccaaaatatgcctctttggcgtaaagattactttgagctgatcatttttagacactagacacaagagaagttttgaaaacacaaacatttcccttttgtaagggaaacttacacctataaagaaaaatgtccatttgtaagtgtgtctccctctctgtacgaagaagggaaagatgattaaattactagagacccacccacctaaatctgcataacaagccttactcttatttactgtgctgtttccagtcacatccccattactggccttcccaacacccttctttctttgtttcagcagaagatggtgcttaagcctgaattctaagtcacctcttggagatttgctcatttctttgggtatctcccagtatacatgaggtatatatgttattaaacttccgtttgctatactatgcagccataaaaaaggatgagttcatgtcctttgtagggacatggatgaagctggaaaccatcattctgagcaaactatcgcaaggacagaaaatcaaacgccgcatgttcccacccataggtgggaaatgaacaataacacttggacacagggtggggaacataacacactggggcctgtcgtggagtcggggtaggaggagggatagcattaggagaaatacctaatgtaaatgacaaattaacgggtgcagcaaaccaacatggcacatgtatacatatgtaacaaacctgcacgttgtgcacacgtaccttagaacttaaagtataataataaaagtaaataaataaataaacttccgtttgcttttctcttgttaatgtgtcttctgttacaggggtccatctcaactaagaactctgaaagttagaaagaaaattatttttccttccctacagtttaaaatgagagttaaaggcattttcttgtattacacagaagaaggagaatgctgtgatttttcttgattaatgttgagtatcgaaatggatgtctttctataatgactggagtctaattagctatcctgatttgaagaaagcaggttttcagaaacacagtgtcatatgttcctcctaagttcattaagtaaccagtgatctgcaatttggtatcccagatggacctaccctcaggaagtgaatgtcctgtgcaaagggctatttttcagataaagctcccaagatatggaatagtgttgtagaaaaaaattgggttcttgtcatgcgaccaggaaaatttagacatgcagatgcattgtagggtgagtagggcaggatttattaagtgaaaagaaaatgggaaagaggaactctcagcaaagcgagagagagtcctgccagcaggtctcttgcctcacagattgaatcccaggtcaccacccaggaactgaagaggccaggctcctccccgctgcaaaaggtgcagacttcccaaggctccgccctcgtcctcccggtgcataggtggacattattcagaatcagtcgggaaagggcgggtttcatctgggaccagcagtttggtttttcagccttcaggctgttttatgcttggaggtggggaccctttcgccggggacccatggctggcttctgtctctatcaatagcatatttgagtgcagggctgaggcagcctcttggaggcttattatcatgtatcaaattcttaccccagagaaaatcagagttgtgatttgaagcgttattagggtaattgcatctgagattttgaataatcatcaacagtcacctaatctgcatcacttattttataaaaaggctaatagacattaataatttacctaacatcaaatagtttgtgaacagacaggctggaactcttcagactggaattcagttcaatactctgcaatggcatcatagataatatgcatttgtcaatttgcataatcaatattttatttttgtaccatgcaggatcattgtttaagtacacagtgatatacttcctgacctttagaattttaaatcactgggcttagtgaaatcccccaaacacatttaaaaactcatagaaaggcatatgaatgcaagcatttggagtgttctgaataccaaaagccaaaaccagtacaggtaaatgacaagcatcacttaaaaagaatgtctgaacagctggctgaataaatcagccaaagttgaaacactcttttcacttgtctgtgaaatttttcttcctagaagtgagggagtcccttgagggaaagaggataacaggtaagcgtattcactgtttgccacttctagaaataaaatgctgcgtatgtattcatatgtatgatatataacacacaactaaacttttttttttttgagacaatgtctctctttgttgcccaggctggaatgcactggtgtaatcacagctcatggctcacagcccacctcctgggctcaagggatcctcccatctcagccttccgagtggctgggaccataggtgcacactaccatgcctggctaattttaaaattttttatagagatagggtcccattacgttgcccgggctggccttgaattactggcctcaagcaatcctctggccttggcctcccaaagtgctgggattacaggtgtgaaccactgcacccaaccacaagtaaacttttgaatccaaggagacacatggtgtggggtccagactgctgtgaccatcctatgtcaggacaagtctagtgcttcactatcaaagacatttctgaaacatggcctgggcttggtggctcacgcctgtaatcccagcactttgggaggccgaggcaggcagatcacctgaggtccagagttcgagaccagcttggccaacatggtgaaaccctgtctctactaaaaatacaaaaattagcctggcatggtgacgacctcctgtaatcgcagctactagggaggctgaggcaggggaaacgcttggacctgggaggtggaggttgcggtgagccaagattgcatcactgcactccagcctgggtgacacaatgagatactatcttaacaaacaaacaagcaaacaaacaaaaaatgaaagaaagaaagaaagaaaaagaaatttctgaagcagaataaaacaccagccactgaaattggatttaatataagtgctttgtgactttggtttatacttttgttgctagggacatggaattttcatttttacctccagcttggaaccagccataagccagtgtctcctcatggctagctaagagcatttcctagtctgtttgggaaggagatagaacctcattttcctttctacattccctatgaggcactcaaattccttgaaatcatatttcccaggaatcacaaatgaaccaatctaaactctgtggggatgatagactttcttgaggtcctctggatttcctaggtccaaggattggtatttgtggtagtgggtgatgcccaagggtgaaggagaactgttactatattcagaaccctgagagttcattctgtccttcacttgaaggaaaactatcaacaggtaacagcaccccttagacttgctccttcttctgtggatgcccttttctggccatgggcacttgaaggaaatgaatgagagacccaggacataggcgctggggaaggagtagagattgatgtcagctctttcctggaaaggttaacagaaactacagggcatgatttattgaaataatctgggtgaaaatgcttgtatatgctaatcttattttttattttattttgttttatttttgagacaggctctccctctgtcacccaggctggaatgcagtggcatgatcttggctcactgcagacttcgcctccgaattcatgtgattctcccacctcagcctcctgagtagctgggattacaggtgcgtcccaccacttctggctaatttttttttatttttttattattattttttttttagtagagacagggtttcaccatgttggtcaggcttgtctggatctcctgacctcaggtgatccgcccgcctcggcctcccaaagtgctgggattacaggtgtgagccaccgtgcctagcctaatcttatgttttaatttcaaatattatttttataattaatgttcacatcccttatttattgaatgaaaacaatgcaatgggttagataagtgctagaactaatgctctataataaactctaaaaaaccctagccggctgggcgcagtggctcatgcctgtaatcccagcactttgggaggccgaggcgggcggatcacaaggtcaggagatcgagaccatcctggctaacacagtgaaaccccatctctactaaaaatacaaaaaattagccgggcatggtggcgggtgcctgtactcccagctactcaggaggctgaggcaggagaatggtgtgaacccgggagacggagcttgcagtgagccgagattgagccacctcactccagcctgggtgacagagcgagactccatctcaaaaaaaaaaaaaaaaaaaacaccctttcttggtggaaaacgtcaaaactatttaaagggagtgagaatagtataacgaacctgggtatgcatctaatctagctccaacaattatacaatatcagttcacagccaattttatttgatctatatctctctctgtccctcctcaaattatttcgaggcaaataccggacatatttacatttacctttaatcttttcttttcttttttttttttttagatacagggtctcactctgttgcccaggctggagaacagtggcacgatcatgcgttattcactgcagacttgaactcctggcctcaagcaatctttctaccttgacctcccaaagtgctgggattacaggtgtgagccactgtgtttagcctagacttacctttaatagcttttgataagttattttttaatgtaattttgataaaataattgtacctaaaatgtactaatgtgttggtattgtctactatccaatctacgaacaaattttactgattcattcgtaactgaccccagagttggtttgtttgaatcactgtaactgagcctctattataaagatcatacgatgtttgttttacctactttccctttccccttgtccttttcttgctctatgcgtgcttgcttgcatgtcattatttcagtagagggtagtcactaataattgattaacttcatatcctaacctacaggggtgcctggcagattgatgaacttgtttttcttttaaagaaccatgatccttaggttatgcagacctccttgatggtgtccagaaatttgggtagagggatgccaacagctttgatcactgggggagtttcatctcccatatacccaccttactcatacaagtccccagttaaattcaaaggcagggcagatttgagagactgtctctcctgccctcttgctttggtcaaattgaataaacctttctctgttcctgagtgctgatgtgtcagtgtttggcttaccatgcatcaggtgcacagacctaaatttggagattctgtaacatcaagacccatatgacgttcacatactggattaggctgatgactcatatatctctcttttaatgtgtgaccatttacatctctttctctctctcctcccttttttttttttttttggcaatttctttgttattaatggtcttgttttaaagtgaagtattgtcatttaagtttatatatcaatgttatcattatttgtttatttacaacaaagttttatgccaaggcagtcatgccattacccacctgacctgcttttccaccatcagttttacctgtgtgtgtccctggatcatcaggaagcattgattgagaatctttttctcttaatctgccttactattttctaatgtagttactgatcaaacttagcagtaacccactcattttgtgtgtaggcaaaagcaactatgaataaacagaagaagtctcccacagtgggtaaatgtgtggacctgggtttgaaacctgatgaaacttgctggctgtgaccccttgggccagggattaactgctgtcactcttagttccctcaaccctcaggtgcatgtgattatattcactgcctgatatggtttggctctgtgtccccacccaactctcatcttgtagctcccataattcccacgtgttgtgggagggacccggtgggaggtgatggaatcatgggggtgggtctttcctgtgctgttcttgtgatagtgaatgtgtctcatgagatctgatggttttaaaaacgggagtcctcctgcacaagttctctctttgcctgctgccatccacataagatgtaacttcctcctcctttccttctgctgtgattgtgtatcctccccagccacatggaactgtaagttcaataaacttctttcttttgtaaattgcccagtctcaggtatatctttatcagcagcatgagaacagatcaatacagtaatttggtagcaggtagtggggtgctactctaaagatacctgaaaatgtggaagtgattttggaactgggtaacaggcagaggttggaacagtttggagggctcagaagacaggaaaatgtggaaagtttgaaactccctagagagttgttgaatgactttgaccaaaatggtgataatgatatggacaatgaaatccaggctgaggtggtctcagatggggatgaggaactttttgggaagtagagcaaaggttatgtcttgttatgtgttagcaaagagactggtgggattttgcccctgacctagagatttgtggaaccttgagcttgagagagatcatttagggtatctggcagaagaaatttctaagcagcaaagcattcaagaggtaacttgggtgctgttaaaggcatttagttttataagggaagcagggcatgaaagtttggaaaatttgcagcctgacaatgcaatagaaaagaaaatcccatattctgaggagaaaatcaagctggctgcagaaatttgcatatgtaacaaggagttaaatgttaatccccaagacaatggggaaaatgtctccagggcatgccagaggtcttcacagcagcccctcccatcacaggcctgcaggcctaggaggaaaaagtgatctcttgggccaggcccagggtccccatgctgtgtgcagcctggggacttggtgccttgtgtcccagctgctccagccatggctgaaaggggccaacatagagctcggattgtggcttcagagggtgcaagctgtaagccttggcagcttccatgtggtgttgagcctgccagtgcacagaagtcaaaaattggggtttgggaacctctgcctagatttcagaagatgtatggaaatgcctggatgccctggcagaagtctgctgtaggggaggggccctcatggagaatctctgctagggcagtacagaagggaaatgtgggatcggagccccagcacagaatccctactggggcaccgcctagtggagctgtgagaagagggccaccatcctccagaccccagaatgatagatccactgacagcttgctccatgcacctggaaaaaccgcagacaacaccagcccatgaaagcagctaggcaggaggctgtaccctgcaaagccacaggggcggagctgcccaagatcatgggaacccacctcttgcatcagcatgacctggatgtgagatttggagttaaaggagatcattttggagctttaagatttgactgcccctctagatttcagacttgcatggggcctgtagcccctttgttttactcaatttctcccatttggaacagctgtgtttacacaatacctgtacccccattgtatctaggaagtagctaacttgcttttgattttacaggctcataggtagaagtgacttgccttgtctcaaatgagatgttggactgtggacttttgagttaatgctgacatgagttaacactttgggggactgtttggagcacatgattggttgtgaaatgtgaagacatgagatttgggaggggcaaggtgtggagtgatatggtttggctctgtgtccccacccaaatctcatcttgtagctcccataactcccacttgttgtgggagggacccagtgggagatgattacatcatggggctgggtctttctcttgctgttctcatgatagtgaatgggtctcacaagatctgatggttttaaaaacgggagtatgcctgcacaagctctctctttgcctgctgccatccacataagatgtgacttcctcttccttgccttctgccatgattgtgtggtctccccagccatgtgaaactgtaagtacaataaacttctttcttttgtaaattgcccgctcttgggtatgtctttatcagcagcatgaaaatgaactaacacactaccttagagtgttagtgtgaaaagaggcaatgtttgaaaatttttagcttggtgctgcccacactgtgagcattcagtaattgtgagctgtaatgctcactgttgtgttccattcccacagtaatttttgtgtatgtgttttgattttttagacttaaaaaatacagttttagatttatagaacaattgaacagataatacatagagttctatacacccaccccatccctacctctcaatttccctccacaatttcccctattattaacaacttgcattggtgtggtacatttgttaaaattaatgaaccaatattgatacatgattgttaactatagtccatagtttacatgagggctcactctttgtgttgtgtacttctatggttttgacaagagtataataacacatatccactgaaagggatcagaatatgctaccccaaaatattctactttggcataagaattattttgagctgaaggcaatttagaagcagcagactcaggaagagctctctgacctctcttttctgcctaaaagcaggggataaatttcccttttcccatactgaggagaggagaatgattctccattcttacaaccagagagaacttgagtttgtgtagcaaatctcagtaaacagcccttatctaccatgtacttcctagtcaccttctcccaatttaccacccctaggaacccaagctccccatttcttttgtctagtcatgtctccccgagttatcatcctttgctaaaatggtgtattagtcccttttcatgctgctgataaagacatacgctagactgggtaatttataaagaaaaagaaatttcatggactcacagttccatgtggctgaggaggcctcacaatcatggcagaaggtgaaagatatgtcttatatagtggcaggcaaaaagagagagtgagaaccaaacgaaagggtttccccttataaaaccatcagatctcatgagacttatttagtaccatgagaacaatatgggttaaacccatgattcagttatctcccactgggtccctcccacaacatgtgggaattatgggagctacaattcaagatgagacttgggtggggacagagccaaaccatatcacatggtatataagccccagggtctaactacctctctgagttttcagttctcttctatgaagcccctgtggacataaaattaaaaataaactttgtctgcctcttctctgattaatctatcttttttcagtttaactcttaaattccagccacagaaactaagagggtagaggaagtttttcctcccctacatattcattatagtttcatacagaacaatttaaccaccctaaacataccctgtgtacctattcatctttctctccctcccttaaaatctctggcagccactgtctttactgtctctatagttttgccttttccaaaatgtcatatggctggaatcatatagcacgtatcttttttagtctgctgtctttcacttagcgatatgacttaaagtttcatttaaaaaaacgcatgtgatttgtagttaatggaaaggattacataaagcacattttatgtgaagacatgggagttgcttttgatatttttacttccttgattcaatatgagactgattagagggctttctcttccagcactgaccagagggtagaaagaaaaacgcgaggattctggattctctctttataagcacattgtttatggttatagctcatccaggttgagtttagtgcagtggctcctacagctgatccgtgaactagctgcaacctgaaaatacagattccttcatccctgggagtttgtgactctggagcactggagaaagacccaggactgcatttttaatgggcttctcatgtgatacttacttatacagaaccatttctttggtagtaaaaaggaataccggctttggtctcagaggatttggcgtcaagtcctctctcttcattgaagcaccaaatatttatttaactcctcccatgtgccagaccttggaccaggctctggattgatacaacagtgagcttaatagtcatgctttctacccttcacaagcttacactggagaagaggcaggcattaagtacacaattacagaaataaatcttattcatcaactatgctaagtgctaagaaagaaaatacaaaatgctatgagagagtgttaaaaaagggatctggctttgtttgaaatggggtcaatgattcacttttccctgagataatgactttgaactgagatattatttacgtgacatgagggaaagatgtctgccacccgggcacacgaggtccatttggcttggaacacaaggagagacagagatgaggctgcaaattaaccacttgatatctgtccttctgcagatcaacagccagggtcactgggtgtctagctaacctcctactcaactgcactgaaatttctcccaaatctccaaaacatgtttagtaattctgccagttatatttatcaagagcttaaacaatcagattgttaatagccttttcttaaaaagtgttagaattttagttgttagtgaatgattcttaaaaggctgttctgtctttgggttagggccaattgttcatttactgaaagatatacacggaaaagaaaaggatctgattctgcattgccactacttaagcgctgtgaaatgcttgagcttttgtcaggtgtctgtagcctcatttcatcttcactgtagacttgtggaaatgcattattatgacgccaattgtacagatgcagaagtaaaggctgagagaaatgtagaggttcactgcattgacatagtgaggaattgattgcagtggttggctgtcagggaacagtcaatgtccctagctaggacaattttaatactaccattgtgtcagttttgggccccagttatgcattctcttttggaagacatacaacctggacatacttatgtgaaccccgaaaatctgaggcaggtctcagttagtttagaaagtttatttgccaaggttgaggatgcacgcccatgatgcagcctcaggaggtcctgaagacatgtgcccgaggtgatcagagcacagcttggttttatacattttagggagacatgagacatcaatcatcatatgtaaaatgaacattggtttagtctggaaaggagggacaaatcgaagcagggagtgggcttccaggtcgtagataagagacaaatggttgcatttcaagtttgtgattagcctctccaaaggaggccatcagatatgcgtttatctcagtgagcacaggggtgactttgaacagaatgggaggcaggtttgcctttagcagttcccagcttgacttttccctttagcttgatgattttgggggtccaagatattttccttttctttttttttttttttctgagacagagtcttgctctgtcgctcaggctggagtgcagtggtgcaatctcagatcaccgcaacctctacctcccaggttcaagtgattcttctgcgtcagcctcccatgtagctgggattccaggaacgtgccaccatgcctgactaatttttgtatttttagtagagatggcgtttcaccacgttggccaggctggtcttgaactcctgacctcaggtgatccacctgcctcggcctcccaaagtgctgggattacaggcgtgagcctggcctttccttgcacacttaacatcccaggatcttacttaatgctgggaatgaggttctatggaggactcccggtgttttttctcctgctctccaaagccaaccaagatctcttcagaaatcttcagctcagcccaaaggagaaacttccaaggtaaaagaattttcctaaaagtataaatgatattaagaattctgcccatatggactgggattatgctttatttcctgatgggcctttttcaaaataaatcatgttcctactctccatcttagcagatgatgaaggcaattgctgctgaaatggaaccatgtggtaacccctgcattaaagcaagtgtaggtttattacatacattggacacagtaggtgacaatgtagaattatttattttaagggtacaagaccatttaccttccttcctcaatatccttcttataccttattatagtgctgcactttacactgtaagaatcattccttggaatttgtaaggccctgaatataaaaagccactgttaaaatagcatgctacctaagaaaagtaacccattaacatccattaaggcttaagtgttaattataatcatgaagtttgaaagttatggctaaatgatttattattcagaagccaaagccttctagatttgtttgactccaaggatagagtcaaaagttcaaacgattctaataatgcaaaaatatcaagaaattatggaatcttctcattccacccttcctctttatcttaaactgctactatttcaaaatatatgtgttagtcatgccgattactgtgaggttatcaagggtagtcttcaatatagagcctttactttcttttcagagctttatgggagaactggttgtcttctatgttttcccttgagaattttgcttatctgttgtgtctgtcctaaatgctacagtagttggtctcagactgagctgtgtttttgtacactgtcatggacagtagcatttatgaagcattttttgcatacaattcttgtctttgatagtgattatattttgtattttaataaattatcctgggctgggtgtagtgcctcatgcctgtaatcccagtacgttgggaggccaaggaaggtggatcacttgagcccaggagtttgagaccagttgcagaaaccccatctctacaaaaaatacaaaaattagcagggcgtgatggcacatgcctgtagtcctagctactcaggtgggaggatcacctgagcctggggagatcgaggctacagtgagccaaaagcatgttactgcactgcagcctgggcaacagagtgagaccctgactcaaaaaaaaaaaaaaaattaccttgaatttttctttaaaaaataaaacatatttagaactcaggttttctctcgttgaattctaagtcctattactcagctgagtttttttatggccttgttgaattgtcaacagagacagtggattactgattcatcaagtatatattctctgtagcaggaaaatggaataaggaatgtacttgcatttccacattacctgacaccatcattttaactttattcattaactttattttacggtgtgtgagactcaaaacaaaaatctgccattagttccagtttggctccaaaataaaatattactttgttcattcattttcacatgttgtattaaagtgctgtcactgggctgatgctatgatcctcaccggagggaaatggatggagcacattctatggaggacatagagagaaatctggagcataaggaaaagggccaggctacgttgggttggacatctcagttgatgatacagggtatccaagaagctttagtttcccacgtatggttaggatctaggtacctggatattgaagatataggaagtagaacataagaaataatttttccagttcacagctttgttttgagaaaggctctgagcaagtaaaaaggagcaaatgcttatctgagtagaacttcaacggtatggcttgtgatagccagtctcatgcaggtacgtccttgggatttaacatatacaggctgggttcagtttagaggattctctagcaatttgagaagccaggaaaacctctcaaaccccttagacccagacagaaagaatcaatgagggaatgattcactcaatgaataattaccaactggagtgaaggattctctagtctagtgattctcaatgaataagcattataccatctctgtcagaaatgtatgtatgttaaaatgcagattcctgggccctacctcaggctaactggagcaaaatttctatgaagtggggtctaagaatatgcatattcacagatatgctagaaggttcttattcatatttacagcagacacttatccttggggatatgtcaaaccagccaagtgggaatgaaggtaaaactttgagcctacagcacaaatgggctgagatattttgggtagagcttcttcttatggataaaacaatagtcacatgagtagcaaaaggcttcataaaatattttgacctccacaggtgacataactttcttttgttgtcaactcctgatttattttagagaaattttgtttttaaaagttctctctgatagataaatgtgctgaggcactgagtgtacttttagttcttgcattgggatgtaatctaataaaataaaattccatgcagctatttggatgacatctgtttgaatagcatagtggggcaaatagatttgtgtctatgtatattatttgtgtgttgtattattagcaaatatgatagtgttagcaaatatgatagtattatcagcaaatatgatagcaaatatgatatgatagttgtatgattagcaaatatgtatattatttacgtgttgtattattagcaaatatgatagctttaataataatctaatattaatttatactacttaattttgacaaagaagtagaattgaagtagagatttgatattaaaggcatttatccatctgctttggagtggcaattggtatatagacaatgggctttagattcacataaatgttggtctcaccttttccatttgctcattgtgtgaccttggcatattatttagcttctctgaatctgtgtttttttaactacaaaaagaggacaatagtacattacttctatgatatagaaaatcacggccgggtgtggtggctcacgcctgtaatcccagcactttgggaggccgaggcaggcggatcacaaagtcaggagatggagaccaacctggctaacatggtgaaaccccatctctactaaaaatacaaaaaaaattagccaggtgtggtggcgggtgtctgtagtcccagctactcgggaggctgagacaggagaatggcatgaactcaggaggcagagcttgcagtgagctgggtaccacagcgagactccatctcaaaaaaaaaaaaaaaaaaaaaagaaaatcactttaaggctgatatatatggtggctcacacctgtaataccaacattttgggagcctatggcaggaggcttgcttgagcccaggagtctgaggttgcagtgagctgtgatcgtgccactgcagtgcagtctgggtgacacagtgagactccgtctcaaagagaacaaaagaaagagagaaagagagagagaaagaaaggaagaaagaaaagaaagaaagcaaaaagaaaagaaaagaaataaaaaaagaaaaaagaaagaaaaaagaaaagaaagaaaggaaagaaagaaaaaagaaaagaaagaaagtaaaaggaaagagagaaatgaagaaaatcagtttaatatagtacttggaacatatcaaatgcttacaaaatttagtgcccttcattgcactggagaagagttaggtggcattttgtagctccgtatgctcagatacagtttgtttttgagctgggaatattttagacttcatcttttctttcttagtcctataattttcctttattcataatgcagtcatccctttcccacccatggaaacagtgaaatgtgggaccagccatgctatattattaattttgcaaagcttgctgacagtgacctctccagcagtagcattcactcttttgccttaaaaaatttcccacaaaagctctccactaggcataagcattactcttagtcctcccactgcttcagtgtggcacagtcatcagtaatatgtagatttccactttggctagggtctatttctctgctttgctcagaaggtaccactgacctttctgattagctgagttgcagatgactgagcttgcacataaaagggacagtcagaaaataaatcttccctgtgtctgtctagacagactccaagagtcaggaaaaattctgctgaaagtccataaatcttccatctttcttcctgaaagcatgtacgagaacagttctcctgtcactacgtatgagagcattcctgaatgtgtgggtagggtttttgatgtcaattttttttatatcaactggtaaaactttattttacaagcaacaggaattggatcaaatgattattataatccagaggaaatattttggaaccacagcaaatgccattatacatactgccaatacagatttaatagacaatactgaactgtacaagagttatttatttttccttaatctcgaagctatttttagtaatacaaaaaagccatattaacatttttttcccgttagaaaacatgatgtacaaaactttggatgaaaagataagtcaaatttcgtttaatcacttggaggaaaatccaccaactctctcaataccacctttcactcgcgtccgtgtgaagagaccaccaaacaggcgttgtgtgagcaataaagctgtttatttcacctgggtgcaggcgggcgggctgagtccaaaaagagagtcagcgaagggagataggggtggggccgttttataggatttgggtaggtaaaggaaaaaggggggttgttctctggtgggcaggagtgggggtcacaaggtgctcagtgggggagctttttgagccaggatgagccaggagaaggaatttcacaagacaatgtcatcagttaaggcaggaacaggccattttcacttcttttgtggtggaatgtcatcagttaaggcaggaaccggccatctggatgtgtatgtgcaggtcacaggggatatgatggcttagcttgggctcagaggcctgacgttcctgtcttcttatattaataagaagaataaaacaaaatagtgtcgaagtgttggggcggcgaaacatttttggcagggggtggtatggagagagagaatgggtgatgtttctcaggattaggggaggcgtgggaacctggagtgggagagattaagctgaaggaagattttgtggtaaggggtgatattgtggggttattggaagaaacatttgtcatgtagaattattggtgatggcctggatacggttttatatgaattgaaaaactaaatggaataagagaaggagaaaaccaggtattaaagttctaagaatggggaggacctaggacatgtaattagagagtgcttaaggagatttagcatagttctgccagcaaagattatttatttaagagttaagagtggcagtttggggatagcaccaggagatatcagctgtgatagcttggagaaacagtgtaaactggcagtgtaaacaagagcagggcacgtatgagtagttgagaacagtgaacaggagtatgactagacagaagatagtagggatgacaagtttttttggggcacagtcttaagttggtctggtgtctggaataagactggggcctaataaaaaggagcgtccatacaggagcttaaatgtgctgtaccttgtaggattccgaggacaggcctgaattctgagaagggaaagtggtaaaagtactgtccagttctttttaagttggtggctgagcttggtgaggtgtgtttttaaaagactattagtctgttctaccttttctgaagactgaggaccgtaaggggtataaaggtttcactgaataccaagagcctgaaaagccggtctgctattggactgtatagaggtgggaaggccaaagcgaggaattatgtgtgacagaggggaagaaatgactgcggtgaccttttcagaccctgtgggaaaggcctctacctatccagtgaaagtgtctacctagactaagaggtattttagtttcctgactcagggcatgttgagtaaagctactttcccagtcctgggtgggggcaaatccttgagcttgatgtgtagggaagggagggggcctgaataatccctgaggggtagtagaatagcagatggaacactgagaagttatttccttgaggatagatttctacgatggaaaggaaatgagaggttctaagaggcgggctagtggcttatactatagcatagcctgcctttgctggtgtggtgattaggcctggtggaactgccatcaataaactaagtgtgatcagggtgaggaataggaaagaaggaaatatggggaaatggggtggaatgtcaggtgcatcagagagatacagtcataggggtcaggtgtggtatcaggaataatgtgggaggccggattgaagtccggaccaggaacaatggtaattgtgggagactcaacaaagagtgagtacagctgaaggagctggggagcagaaagtatatgcgtcaggtgtgaggaagaaaatagctggggagcagaaagtatatgcgtcaggtgtgaggaagttatgagaactgttgagagtgagttgagcatagtttgtgattttaagggcctctaaaagtattagggcagtggtggccactgcacgcagacttgagggctaggcaaaacagtaaggtcaagttgtttggataaaaaggctacagggtgtagtcctggttcttgtgtaagaattctaactgcacaggcctgcactttggctgtgggtaatgaaaagggttgggatttgtcagggagagctagggtgggggcagtctctaaagctgtcttcaaggaacggaaagaggaatggggaaaggatttaggatctatggggtcagctaggtttctttttgtgagtttatataatggttttgttaggatagcaaaaccaggtatctaaagtcgaaagtgtctaaccatgcccaggaaggaaaggagttgtcgttttatagctgttggggtttgagatatcagctgaacaggatcagcagggagagcacgtgtgtttttatgagaattacgctgagataggtaacagctgaggaagaaatttgggcttgactgaagtaatgggggctgtctgtgaagcttgcagcagtacagcccaggtaatttgctgagcctgatgggtgtcagggtcagtccaagtgaaagcgaagagaggctgggatgaagggtgcaaaggaatagtaaagaaagcatgtttgagatctagaacagaataatgggttgtggagggaggtattgaggataggagagtatatgggtttggcaccatagggtggataggcaaaataatttggttgataaggtgcagatcctgaactaacctgtaaggcttgtctggttctaggacaggtaaaatggaggaattgtaaggagagtttataggctttaaaaggccatgctgtaacaggtgagtgataacaggctttaatccttttaaagcgtgctgtgggatgggatattggtactgagcggggtaagggtgattaggttttaatgagatggtaaggggtggattataggtcgctaaggagggagtagaggtatcttatacttgtgggttaaggtggggagatataaggggaggatgtgaaggaggctttgaactgggggaaaaggtggcaatgaggtgtgtctgtagcccaggaatagtcagggaagcagataatttagttaaaatatctcggcctaataagggaactgggcaggtggggataactaaaaggattgcttaaaagagtattgtctaagttggcaccagagctggggagttttaagaggtttagaaacctggctgtcaatacaacagttatggaggcaagggaaacaggcctttgaaaagaaggtaatgtggagtgggtagcctccgtattgattaagaaggggatggacttaccttccactgtgagagttacctagagcgtctgtgatggtcttgtaggcttctgaggcaatccggcagtatcagtcttcagctgctaagctgagaagatctgggaaggagtcagagagccttgggccagagttccaggggctctggaagtggctgccaggtgagttgaacagtccgattttcagtggggtcctgcacagatgggacacagcttaggaggaatcttgggctgtgggcattccttggcccagtggccagatttccagagcttgtagcaagctcctgggggaggcaggcctggaggaatgcctggccactgaggtttaggcgtttagaagttcttgtgtgctggagatgtggctggggtttgtctcatagtggaggcaaggaattgcaactcagaaatatgttgctacttggctgcctctactctattattgtacaccttgaaggcgaggttaattaagtcctgttgtggagtttgagggccggaatttaatttttggagttttatttaatgtcgggaggagattgggtaataaaatgtatattgagaataagacggccttttgacctttcagggtctagggctgtaaagcatctcagggttgctgccaaacgagccatgaactgggctgggtttttatatttgatgaaaaagagcctaaacgctatctgatttgggataaagaaaaaggagcattaaccttgactatgcctttagctctagccacctttttaagaggaaattgctgggcaggtgggggaaggctagtcacagaatgaaactggaagccagaccaggtgtgaggaggggaggtgataaaaggattatagggtggaggagcagaggctgaggaagaattgggacttagcctggcgaggaggggagaagtcagatgagtctgtagaaaaggactattagaaagactcagtgacacctggggttgggactgaggggacaggcaggagggaaagaaggaagatttgggactagttgcattgggaacagagactaaggagggattgatgtgtaaaagaatggctggacgtcaggcacctcagaccgtttgcctattttatgacaagaattatttagatcttgtaggatggaaaaattgaaagtgccattttctggctatttggaactaccgtcgaatttgtattggggtcaagcagcattgcagaagaaaataagacgcttagattttaggtcaggcgagagttgaagaggttttaagttcttaagaacacagactaagggagaagaaggaggaatggagggtggaatgttgcctatagtgaaggaggcaagtttaaagagaagggtagagacgtggagtaggggatggggagcagccaaagcaggcatccccgcaattgacttgccaccaagggaacgtgggtgaatgaccaaggcaggtgtccctgcggagatcagacaccaatggaatgtgggtgaataatcagagaggcatccttgcaatgattaaacaccaagggaaggctgccttcccgagtccatgaccggcaccggagttttgggtccgtggataaaatgtgtctcctttgtctctaccagaaagtgaaaggaattgaaattaagagaagggagagattgaagtgtggtgccaagattgaaaggagaaagaggttgagagatagtgagggaggttggagaagagagtaaaaagaggctgcttaccggatttgaaattggtgagatgttccttgggctggtgggtctgaggacccgaggtcataggtggatctttttcacggagcaaagagcaggaggacaggggattgatctcccaagggaggtcccccactccgagtcacggcaccaacaccaaatttcactcgtgtccatgtgaagagaccaccaaacaggctttgtgtgagcaataaagctgtttatttcacctgggtgcaggcgggctgagtccgaaaagagagtcagcgaagggagataggagtggggccgttttataggagttgggtaggtaaaggaaaaaggggggttgttctctggtgggcaggagtgggggggtcacaaggtgctcagcaggggagcttttgagccaggatgagccaggagaaggaatttcacaagacaatgtcatcagttaaggcaggaacaagccattttcatttcttttgtggtggaatgtcatcagttaaggcaggaaccagctatctggatgtgtatgtgcaagtcacaggggatatgatggcttagcttaggctcagaggcctgacaccacccaaagtgttttatgcagtgaataaaatcaaaataatgcatcttaataaattccagctgttaaaagaacaaacttagcaatatataacagtttgctacgcaggatttttgactattcactttgggagttattttttaaaatccacttttttttactgagtcttactacatatcaggcactggacttggccatctaggtaactaagaaaaagttggttaagataggaaagacccataaatcaatcctttgattaccaaatgcaatttttaactttcaaacatccccaagatcaagaaaccctaactaaaaatacatacccttctaagtgttatttgattttattagtagcaagggtgtttggtaaggtcgtgaacctctatttttgatccattattccaattaaaagcatgcgtcaaaagctaatttgttatttttctaatgtgtttaagatttggcattcagtttttacacatgtggttcagtgatttatcatgaaccctaaactgcacactgctcaaaaacagcaacacagatgtgcgttacatgaaataatggtttttgatacatatcttcaaattcaattcagtttagggtccagtgaagaaaaagatatccagttatcgggtggtaaagagcagaggaggtaaactagttaagattattaatatgcagtgaagtgttattgtctatcttatcctttgagtaacaagatgctaacacgctttcaagaaaaaactgcttaaaactatgctaaaggcccatgcattgacatcatccattcaacaccgttactttgttacataaaacggttttcttaaggtgtaacatattaggcaataatttggaaattagccaagcactaagcaattataatagcaggtaatacaccatcaatttttgaaacacatttggccacatttcacaatccatctgcagtatggattctatagactctcactcagtttaaaatttgtttctggacctgaatgacaggagaatggctttatgaaattttctcataagacatttaagtagtcttaggttcacaacccttttgttgtaaatgatttaatctgacatgccatataactacaatacaaataattatgttcaattcttaaatgaaaactaaatgccaataaatggtaacagatttgacatggaatgttctaagatcttcctctacataatctgccatggcagattatgaatttcagagcttgaaaacttcagattaagaaccacaagaaaatttactcttgatggcatacaagatcttcctaaaaattaacctaagacctagaagtctcagtattattagaacataaagaaacgcaacaaatctgtatattttattcacatatatttttgtttttagtgtgctcacagaaaattagaacaccttaagtaggagtttaatagcaatttttgtaagcaaagttacattccatctctaagtcaaattggtcgacgcttctccagcatttacaaaacatgatagacaagatgctacacaaaaccattgcatctgaagattttttttttcctttattctcaaagatgactggaaaagaaagcattatctgctgtaatcaaaaacataccacagtataaacagtaaccattccgcttatcacagcttggttgagtttaaaatttgtgtttaaaaggtccaagatgactgcagttttacaaaaatgggcagggtggaaagtcgcaaacttcatgtgcttctggatatcaagatttgtttttatacaatagtcacagttaaaaacaccctgctggtaatacataattacactttattaaggtcataaaccagcaataaacaatacagcctatataacttgtagttctacttaatcactgactggtacacctaacatgagataagtgaaaagttcctatggtttaaatgaactcctaagactatgatcatttttttttttttaaatatgggtattggtgttttttcttttttcctctttccttcttagtcaagacttgtagtgttgtaaacctgcctcacaaaatacatggtaataacttttcttaaaaaaaaagacagcctttacaccatttctagtggcacattattttggcaatgttatgtaccacttccatttccccattgtgacccctatcacttcatttgatatccctttttgacccacccatctctttcatatatgggcatatccatagattgacaaaggaagtttacatttttggataaagatggagagtatgcaaaaacattaatactgatgcaaaaaaataaaaaaatagaaacaaggcagaggaagaaggtgtttaagctctcctcgacctgttggaatggtggttaacagaatgatttgagatgggatctgtggggaggggagaaaaaaaacaaaattttgtgcttaaaaaaagtaaaagattgatgtcaaatatttgtactaagattgcgggtggcaagagttagcatcctgcagttagaagcaaaattagagatttggactggtcaaggacagcattgatatgtgtggggtatgtaaatcacccaagctctgcaaaagtactgagaataacttgtattttccagactgaaaacctaccatgatggggagggattgaagtgggccctggaacaactccggaatacattacaagcttaaggggagagcaaggaatttagaccatagagctcatcattcatcattttattccacataaaatgggtgtttcagcatgtccaaaagcatagataaggaaattgagcttcccaagaagttaagccagttgtttgcagttagagaaagcatgtttttatgaagctgtcctacccaggagcggggaacaggtccctgggctctatgaccatggaaatctctagatgagtaaaagaaagcttggcaaaaattgggcaggatcctcaaacaaagattgagaaaggcttttctcatctgtgaatcagagttctggactttcctgaggatgagaacagctgcatggctgaaatgcagcagcccagagcaaagagggtgctccctggggggtcacagctggtgaagactgaaaatccagatcctaaaattcaaccagacctatcataccagcaggccaccacgaaatgactgcaggtttcactggagagacgaggtacttggcctgcgaattgctttctatgtcctagacaagtaattgcgagtaagccttgagatagcaatttgatagtctttgatagcaatatgacattgctacatccaagtgtgggagtcagtacacttatattgcgcatatcttggacattttaggtttcattttcatttctttttaccgtcaaactgggggaaagattggcccttcatcccagattgtatttatgctcatttttgttttcacccctgcccatgcccacccaaccacactcctgtccatcctctccctcgctactcatatacccctgggaaaagctcactgcatttagatcccaggttcttctcccccaaggcacatcgcttaacattaatgctgggtgctcacttgatggcaataacatttcttttgaaattttcaagaatatgactcttcaagaagcaacaactagaaataattaaaagttcacatgactgtcagagaaaatatagcagaggcagtagcagtcctcgctgagaaacccagggagcaactggttgggctgagaaggttcgtgaggaatctttcatggagaaaattattttgccaacagttccttgattattatttaatcatacagttggctctcttgtgttcctttaagatctgtgagataggtacaaacaagattttatattcaatagcttatacctgtaagcagtacaggcttttaaaagattggacttttaaggcaaaggtaattggtgtgaagtattagccacttaatggaaaatgataaaatggtacatgtttcaatcagaattatgagctgtgctcgacgtggctgtttgtagctgaagttcactgatttctgtacaatgatgaatttctttgtggcagctaaactgctcagcctagagttacacaatcttcaacgatgacgtttccaccctttgcttgggtcattgaatgtctcaggaagaggcatgaagaagaatgaggagctcgacccacctggagatgggtagacatgtttgctgagctatcagtgaattgacgcatccaaggatgcttttctccctacaggaataatctcccgtcatgtctcaaacttctctccatctcactagtgaggatgaatgctgtcttcctctagggtagtggaggacaatcaggtcactgccagaagacagcttttcacactctcgctttcctcgagagaatgttaaactaattggagtgaggcatgaaaggatgaaatttggccaaattggcaggtgtgaacgtcctttcttcacaccaagtagagtcaactggggaaaatgatggtgctgtcctgatgtgagactgtttctcatagcacggtgctggccactgcatgacactctctaccagcagagaagtggagtgctactgtgaaaagaactgacggatatgatttggttctgggaagtgagttttgtaacaccatgctggaaactaactcattagctgtgatcttgcaaaaattctggcattctgagataaagcaatttgatcaccagtatgtcatataaagaggttttggagtagctttaaaagacacagtagatcaatatgaaaatgaaatgtatccatctaataagaatattcctcttggaggagccagtaaaagtgtgtgttcttgtgcctgcctttgtgtgtgcagacacgtgtgcatatgtgtgtatgtgcagcatacatgtgtgtggtataaagaaagaaaaaaatcttgttgcgtaggaagagttgtgtagagcctactaaaaattatatagccaaggcatgtctcttaattttggaactactaggtgttaaaaagcaaaggaaatgaacatcagagcaagtgaaatatgagagccagaaaatatcaatgtgagttttgatatcaatagaccaatgaattgccaatgatgcagaagagctttatgagccttggcaggcaattaggtaagagtagtttcttctggagtggcaatttgaagtggttattaactatatactgaaatttgacgggctaaagaacccagttaaaaagaaaaccatccatatcgaattgttccctctactttgtttaaaaaacaaaaaacttcatgatgagctgaagtaagagatttttataccaaacaaagatgactaaactgaaagtatgaaaccttctatttttagtgaatcctgacattctctactgctagcattcccagcttccagataatatgttctccagttggctggttattgtgctgtaaatcacatttcactatatcagcaaacgatggcatgaacttgaagagcaaaacaaaatcagcttggaaaaactgacataaaacctctaaagtctaaaggtagtcccttcccttagaaaatgactggattgattacaattgcattgtattatcaaatatgtggttttattttaattttgtttactttttatttgtttactttttgagagataggatctcactatgttgcccaggttggtctcaaactcctggcctcaagtgattcacctgcccttatctcccaaagtgctgaggttacaggtgtgagccatggcactatttttaaagattaaaatatatttaaacaattaaattccaagtgaagaaaaacatagataaagtggaaggtgattaaaaaagcaagtgtttgctgcactctgtttgctgttcttttctctgttagttgctgaatcacacttatgataaattacatttacaattcatttgaaaataaagctaaatatcaagttttgggatattagaaagtagaggctacagagaagtattcttatctaaatcaataggaaaagtagaatttttcccattgctatgtgataacatagcttatcactagccaatttctcactatctgcataagattttgccaatggacagaaatctgcttccttactttctgtgtcaatcaaaaatagtatcctgagatattattttgtgtttcacagactagaaatttttagcaacctgaggacatgtgacttgaaaacatgagcagtgccaagaattatattctcttccagttttcatagctaaagggagttagagttgaacaattcccagaacagcacagaaagctagaaaatattaaatttacaggctaaggctttgccattgaaagctgactatggagatttttagggtaggcaggaagaacaacacaatctagaagtttgggatcttgctatatttccccttcactaagacttttctaagtaaatagttaattaatatcccaggatctcaatttccatatctgtaaagtgaaagatttgaatggataaactataaggtctctttcaaataaaaaattttatccttgtatggcactctccataattacacacatgtataatctaaccctatggaactacacattaatttcccaagtgtgatatttatgatctcttctgatggttgcatgccatttgttaacgtgactttgacctttcctggtctgtgtggcagctgagctactactgctatatcctgaaccagggctttggctaagcagggatgtccaagtgcattccttatgacccagagaggctcataattccatacaggaacattcatgggaccttgaagaatttatgtttgtgttggtaaatttctcttcatggcctccttgagagcaatgaaagaagtgtattttctgacagctccaacttcttactgcctgtgtttgctcagcattatttcagtcataggtgtccggaaccccagaaagtgcaaagacatcctcacagctccatgaatatatgaccaatactcttcagaggggactgaagatggattagcactttgtaggtagaggttcaaatcccaattgcaacagcaggctgtgtaaccttgggaaatttgacctctctcctttgtaagtgggcacaatggataacatgagaccatatttgtaaatcacctgatgcggtatggcaggctcaaggagtgttgtctttgcactgcccttccatgctgtgtttatcctgttatgaataaaatgaattcaacctgttagactgtcagcgccttcataactggccttccctttcggcttgaggcatgccatctgccgtattttgcaccaacttcaagaacataatgtacttacaaaatacttgtcagtgtggactctgaatgaatttttatagcattaaaaacaaaaacagacaatcagagcaaggaacaagaacaagccatttacaacagaataaacacaaatggctaatcaatatatgaaaaattggtccaactttatcctcagagatccacaatttaaaaaaataacagcttcgagataatttacataccatatgattcgcctatttaaagtgtatatacttcaatggtttttagtatgttcacagagttgtgcaaccatcatcattaattttaaaacatatttattacccccataaaaactcatactcattagtggtcattccctttttttttttttttttttttgaggcagagtctcgctctgtcgtccaggctggagtggcaccatctacgctcactgcaagctccgcctcccgggttcacgcccttctcctgcctcagcctcccgagtagctgggactacaggcgcccgccaccacgcccggctaattttgtttttttttttatttttagtagagacggggtttcaccgtgttagccaggttggtcttgatctcctgacctcgtgatccacccgccttggcctcccaaagtgctgggattacaggcctgagccaccgcgcccggctgtggtcattccctttttatcccttaatcctttccttccccttaggtaaccactatctactttctgtctatagattttcctgttctggacatttcatgtacacagaatcctacaatatgttgtcttttgtgattagctagttttgcttagcaaattgtttccaaagtttatccatattctagcacattcactttatgcctttttaaaaaatttggaatttgtttttttattttttaaattcatataagatatatctaacataaaatttgctactttaaccactttaaaatatgcagttcagtggcattaattatgctcataatgtcatgcaaccttcgcggctatttccaaaacgttttcatcaccccaaacagaaactacaaccattaagcaataactttccattcctccttcttcccaggggttgataacctctaatgtcctttctctctctatgtatttgcctgtcttagatatttcatataagtggaatcatacaatatttatccttttgtatctgttttatttcacttagcgtaatgttcaagtttcgaccatgttgtagcatgtatcagaacttcatttcttatgaataaatataccatattttgtttattcatctgttgatgaacacttgggttgttcctaccttttggctactgtaaataatgctgcaatgaacatgggagtgcagatataccttcaccatattgatttcaatttcctctggatatatacccagaagtgggattgatggatcatattgtagttctatttttagttttttgaagaaccttcatattattttttatagtggctgtactaatttatattaccaccaacagtgtataagggttcccttcactttgtatccttgccaacactcatctttcatctttttgatagaagccattctaacagatgcaaggtgatatttcattgtgattttaactagcatttccttaatgatcagtgatgcttagcattttttcatgtatctattggtcatttgtatgtcttttttttttttttttagaagtgtctgttcaagtcctttgtccatttttaaatcaggttgttttcctttcattgaggtgtttgagttccctatatattttaggtattaactccttatcagagatatggcttgcaaatattttctcccattctgcaagatctacggcttcaatgcaatcccattaaaattctttcattttctgcagaaatagaaaaaacaatctttaaatttgtatggaaccacagaagactccaaatagccaaagcaatcttgagcaaaaagagcaaagctggaggcatcacacttcctgatttcaaaatattttaaagtgattttaatcaatagatagtactggcataaaaacagacaccagtgaaataggatagaaaacccagaagtaaacccacatactcacaattgattttcaacaacagtgtcaaaacataacattgggaaagggcagtttcttcaataaatattattgggaaaactggttaaccacaggcagaagaatgaaattggatctgtatttcacactgtttacaaaaattgactcagaataattaaagagttaaatataaaatctgtctttttgattaaagccatcctagtgagtgttaagtagtatctcattgtggtctgatttgcatttccctgatggctaatgatgttgaatatcttttcatgtgtttattggccatttgtatattcttaaactgttagtggaagtgcaaattaactttaaaaagccactcactttggaggacagtttggcaatttcattcattttgagccaacaaacccatttgtgggaatttaccttaagaagataattacagaactatgaaatgatgtgtgctcaagttattgcagccttcttttacaataaagaatcggaaacatactctgtagaagttttaaaaaatagtaattttctgatatacacaaaatgatgtactatgcagccattaaaatgatggtatggaaataagtacttcacacgtaaaatacctataatatacaagtcaaggattccttatccaaaatgcatgggatcagaagtgttttggatttggaattttttaagattttggaatatttgcatatacataatgagacttcttagggatggtacccaagttcaagcatgacatttatttatgtatcatatataccttatatccatagcctgaagttaatcttatacaactttttctttcttttttttttttgaaacggagtctcgctctgtcacccaggctggagttcagtgctgcattaagctcactgcaacctccgcttcccaggttcaaaactctcctgcctcagattcctgagtagctgggattacaggtgcacgccaccaggcccagctaatttttgtatttttagtagacatggagtttcaccatgttggccatgctggtcttgaactcctgacctcaagtgatccacccaccttggcctcccaaagtgctgggattacaggcgtgagccatggcgcctggcctatacaatattttaaataactttgtgaatgaaacaaagtttatgcacatttagccatcaaaaagcaaaggtgtcactatctcagccacccacgtggacaacctgtggttgtttggcatcaccatcatgcctgactgaatttatatgccaccaatgaacaattattttcttactcttatttatacatgagtctctaatagtaaagacaatgacataccatcaatacagtgaaaaaatactgtgttcagcatagctaagcagaacagtagcatcaccagaatatctgtatcagctgttaaacaatagcagcaatgaacaacgacaggctttcagtccccacttgtgacctgttacgtcaggtcagatgtggaattgcccgcttgtgacatcatgtagttgctcaaaacgttttgaattttggagcattttggatttcagattttcagtttaaggatgctcagcctgttctgttgaataaatagtgtgtcacagagtagcatgccattttaccttttgtcttttaccactttcgtgaaaacgttcgccttcttctctttgtatttgtgtacataaggagatgtacagcggatgactggtaaaagtgaacagtgtttacctctaggtgctggaatttgggatagcattttgtttttcctttgagattttctctgctgttagaactaaagtaattcagcctatatcaaaacaacaataataaagttactttcaaaggaagaataattttgctctgaactgtgcctaccactatctccccttactattgaggaccacaccattttgaccctgaatttctactttcaaaccacaagagaatcccaataaactatagtaacatggagaactggtgtaagaaaaacacaggagcttgttttcattgaatttccttgcaataattacacgagtttaattaaaacaaataaattagaattgatacactggaatcaatatgcaaaaaacaaaatgtgcttgttttacgggtcctaataggattccaagcaggaaccattttctagcatttatttctagcacatctatctttgaatggaaatttgtgggagatgatgagagaaatctaaacatttcccattttggtgcttatcatcagcccagaaggtttagttcatccagtcttgttcagaattgttcatgctctgtcatgcctgtgctcattgatgtggttggctccgtgtccccacctaaatctcatctccagttgcaattcccatgtgtcaggggatggggcctcgtgggaggtgattgaatcgtgggggtggacttcccccttgctgttcttgtgagagtgcgtgagttctcatgagatctggttgtttgaaagtatgtggcactcctccccttgctctctctctcttgctgtcagaggtgattgaaccagaacaactccattttgagtaggggctgggtaaagtaaggctgagacctactgggctgcattctcagacagctggttaagctttctaagtcacaggatgagatgggcggttggcacaagatacaagtcataaagtccttgctgataaaacagattgcagtaaagaagctggccaaaacccaccataacaaagaaggccacatgagtgacctctggtcattctcactactcattatatgctaattataatgcattagcaagccaagagacgttcccaccagcaccatgagagtttacaaatgccatggcaatgtcaggaagctaccttatatggtctaaaaaggggaggagtactcagttctaggaattgcccatccctttcccagaaaactcatgaataattcaccccttgtttagcatataatcaagaaataatcataaaaatgggcaaccagcagccctggagtaaccattcttttattacttgacattcttagtgaacttgctctcactttactctatggattcaccttgaatattttcttgcccaaatccaagagccctctcttggggtctggatctggacccctttccagtaacactgccaccacatgaagaaggtgcttgcttccccttcgccttccatcatgattttaagtttcctgaggcctcccagtcatgcttcccattaaacctgcagaactatgagtcaaacctcttttcttcataaatttttatagcagtgtgaaaacaaactaatatacccaggctgttccacatctggctaaaaagaccctctgcaccttgaattgctagacaaatcccattgttctaccaagactggctttgattcacatctatgctcccaatactgtgtaaaaactgcctggagatctgtttcttgcttatctatcttcacatctccagagctctgtgcctggaatactgtgagcactgtgcctggaatattggcagcactcaataaatgtttgttgagtaaatgcatgcatgtgtgcatgcaggcagtggtcagattgtaaaaggctttataagccttttacatgctaaaagggaatgctaaagaaagggaaatcaggccaggtgcggtggctcacacctgtaatcccagcactttgggaggccgaggcaggtggatggcctgaggtcaggaattcaagaccagcctggccaacatagtgaaaccccatctctactaaaaatacaaaagattagctgggtgtggtggtaggtacctgtaatcccagctactagggaggctgaggcaggagaatctcttgaaccttgaaggcggaggttgcagtgagccaagatcgtgccattgcactccagcttgggcaacaagagtgaaactccatctcagaaaacaagaagcggaaatcagagtcagtcacaggagtagggtcctatgttgccttagaggtagtgtggctgctttcttgatgtcctctccttactcgtacctgcccagtcttgtagctttcagtatgatccacaaattcaacacacacatacccccaccacgcccaacatacacacatatacatacataaatacacaaacaacagaaaagaaaatgtcaccacatatttcacatgaccttagttctttgtttaaatgaaaaaaaatctcataattttttctcactgaaaaatgaatatatagtcaatgtacactagactatagaaaaaagtacaaagaagaaacatcacttgatatcccattatctacagatgaatggttagagttttgctgtcttttctatataggcatatatatttacatatatatgcatatatttaagtggctgataagacaaaaaataaaacaattaaaggagatgttcttttttcttgggaatatcagttgaacagactgtacattttgtcttttgtaaatttaaggctagctagaaactcttacacttgggaaaaagaagtattcacagatctttgtgtttttgtgtggcttttactccccttttactaatagaattttttttttttaaatcaagagtaaacatgaatgaagggttatagattttggaaagacataacagaaagcagctgcctcatgcaccctctctcttcacttctaatcctgttcaccaaagctaaggacattcaaccatttgcactttttttcatatgtatctccttatttttaaaggacatgcctatattgctattctggatttttcatttttagtagttatctattcttaccatggaagatgaagatttcattctcttacatgccccctccccactcttccaacccatgttccttccttatgctccaaatactgttcatcatcatttttgttcagagtagactgttgaagacattgtttcaataatcttctcattttatttacagttaagctatgtgtcatttaatttttcttgtagaacattttgtttttcctggagtttataattgtgttattttttagtttgtttgtaagtatgtttatttagatactgagaaaaaaatttactcgaattttaccagtgccaatacctggtttagggtagaatatttttgaaaatgacctacaattcctagtaaattgcttgagcaattttctggtagaatttaacaagatgaagagcccactttagaggttggatttatctgcccagctaactgtcgtcagccttatgatgagcttcataaactttagccagactttattatacctagtctaacaaagtcacctagccagctttctttctctttaaatgtctctaccagagaaatcttgactggctttatcagaagcctttgctcttgcagcaagtttgacataaaatattgacactaaccagtaaccaattcgcttggaaagttccttcagctatgttcatcattaattcttccacttagtttccccaagaagtggaaatggcctcccaataccttaaaacacattgggtaatctctacatttcattctttccttgaagacatccttcttggagcatgctattttctggctgcattgtaggttgatgagtctctagacttgctgcacagagatcgtcatggggacttcttttgccatcttcctgggaattccctttcccctctcctagattggatgaagagttggtctcatgggggtctgtgaccgttgcaatcgcacttaccagggctctgcatttggcttagcactctgctgttgccattttgaaattcttaatagctgggcacggtggctcacacctgtaatcccagcactttgggaggccaaggctggcagatcacttgaggccaagagtttgaaaccatcctggccaacatggtgaaaccccatctctactaacaaaacaaaaattagccaggtgtggtggcaacgcacctgtaatcccagctactccagagactgaggcactagaatctcttgaatccaggaggcggaggttgcggtgagctgagatcgtgccactgcactctaggcctgggcgacagagcaagactttgtctcaaaaaaaaaaaaaaaaaaaaagaaattcttaataagttctgaacaaggggccctgtgttttcattttgcactgggtcccgcaaattatatagttgctccttattggactcccaggtttctgtcttttggtttttttttggcaactctctctttttgggggagcacctactctagcagcttcctaagtaatgctgtataagagataagagtttttgaaattttgcatgtctgaaaaaaaatctttatcttaccctcatattcttttttttttttttttttttactttaagttctgggatacatgtgctgaacgtgcaggtttgttacatgggtatacatgtgccacggtggtttgctgcacccatcaactcatcatccaggctttaagccccatatgcattaagtatttgtcctaatgctctccctcccctgtccctaccccctgacaggcccctgtgtgtgatgttcccctccctgtgcccatgtgttctcattgttcaactcccacctatgagtgagaacatgtagtgtttggctttctgttcctgtgttagtttgctgaggatgatatcttacccttatgttctaataatagtatggttcagtatagaattcccaggtggaaattattttccttgagggtttgtttttgtttttgtttttttttgagacaaagtctcatactgttgcccaggctggagtgcagtggagtgatctcggctcactgcaacctccgcatcccaggtttccttgagggtttgaaggcattgcttcattgtcttctgatgtccagtgcttctgttaagaaaacagatgccctttgattcccgacctgtggatacgatctgtattttctctcagttgcagctttgccatctactttctggcaatcaagcttgattgctgttgtcttgtctcatctccttgtttttgcaggtgattatttaaaagtcaccattttagcagtattttgagagagagcagatgtaaacacacattttcaatccgagccacttttaaatgtctgtgttgcttataaagtcagctctttctcttcgtatgtagaatcaggtggtaatggtggggataatttgcataagaagccttagtgccttctggaagacacgaatctttcttttcaaaatttggtggcacatgcttgtaatcccagctacttgggaggctgaggcaggagcattgcttgaacccgggagatggaggttgcagtgagccaagatggtgccgctgcactttaacctgagccacagagcaacactctatctcaaaaaaaaaaaaaagagagaaaattcaatgttaaggaaacctttgctcctgatgagaaagaacacgaaaaactgcagggaaaaattcactattagaaggaagtagactgtattggtaacctagttgtgcctgctggatcaaagtttggctacatgagattgaacaaaagaaccatctccttgttacccaaggagatgtatcatgccaaatctattgtttttgttttgttttcttcaaattattttttccttaataacctggcagtgattcaaaatatgaaaagaagattcagatgtgttctctttaagggggattcgaccatgactgccttacataagcaggatcaaagtccatcatgggactggattccagagaacaatgatggtaagaaggcttcagggctcacagtttgaagagtgttgttacagaaattctctgaggggtagcaggtgcagaagagtcataaaatttaagggaccaaccatggataggctgttgccaggtcatgagcaccttgaagcatctcttgatggccattcattagcctaagtatttgttgtctgggagaactgagcaagatgagctgcacagttcagttgtccatagggtcatgtttcttcagcacagagacctggtctccctgatcattgtgggttatggaaaaacgtgaccacacttaaggcagaagtttcaattccctctgcaatttttcctgcagcactacctgcctaaacacttcacatatatgtcaattcccttccagattctctattgttgaacacgaatgtgtgtggttttaaactattatgaataatgccatcaatatcccaaatcacatatttttgcatattcttcattttttccccatgcacattttacatattgtgttttgccagcatacctccagaaaagttgcttcttcctcagacttagtgtaattttacttaattttttttaaaacacagcaaatataacaaatggaagaaatgacagggtcatttcagcctctttttatttgaatatctgtatttcttaaggttcattttcatctttgatagaattggaatgcatttacaacatgattataatatctgattattaataaatcagaaataaggatgtattttttgttatcactgagatttcaccttcatgtagctctgtacccacttctaagtatattttacaagcatttctctaagaattccaaccatgtgaaagtactctggcaataaaattttaaaagcctctgtttgcactttgtactttttaaaggtaagagaaatttgaggcacaggtgggcagccgagcccttgagagaaagcaacaatagcaccaggtttatcaccgttcaggtaaatgttagaatgtggaatgcttttattatccctgacatagagatccttccagtgtatttagactgaggggtagttttattgtgccaactgtcaaaaggtattgacttcaatgtatgtgggaaaagattggactccagaggcaccgtgattttccttgctctcctggatggtgctgcacagcccacgggggctctggcggctgcatacatgtgcagtaagtgcacctgaaaagaatacatgtgctcaggtgtgtattctgccatccaaatttgctgtacaagctcccttgaagttgactattgatttgctgccaaatgcaagggcaagagacttaatgaacagttggcaacatttatgccaaattatctttaatttttttaagggactatatctttttcaagtagtctggcagtgaacttcagcttcactcattctctcaccctcctcaatatccagttagttatttggcctggcaattcaacttccaaaaatccctctcaattcagtatctcctttccatcctgagctaccgctgctcatgttctagctcatgaatttaatcccaacactaatgaggctccctgcttactggatcttcctttcttaataactcatcactctaaatccattaggtcattgttcttaagaatcttaatggagaaaatattcacaagaggttaacgtaatgcaaaagatggtgaaacgctctggaataaggatggaagcttaatgggaaacaaataccccatcctatttttgcatgtcctctgatctcctgctggggccacccactgccaaaaacaaccaaaagttagagggcaagcaaaagagcatgggtgataccatctatctacaacagttagcttcttagggtacagactaggtggagagataccatggtggggaaaacgacatgtggacgccattcagcacagttactttttctgactctcccaagaagaacgcattttcccctcattgatattccaagagaaatatcattttattggtacctcaactgaggcacctgtgatactatatttgtaaattatttccatgtttagaccttagctccttcagttaagaactatatcttaattatgttcatatctttagcagttagcactatcttgcagacagtggtgcccaatatatgtttgctaaataaaagaacaaatgatggcatagttgtcctggtgtctttaaagaaaataatggctataaagaaatcctttacacctgtaatcccagcactttggcaggccaaggtgggtggatcatgaggtcaagagatgaaggccatcctggccaacatggtgaaaccccatctctactaaaaatacaaaaattagccaggcgtggtggcgggtgcctgtagtcccagctactcaggaggctgaggcaggagaattgcttgaacccgggaggtggaggaggcagtgagctgagatcacgccagtgcattccagcctggggacagagcgagactctgtctcaaaaaaaaaaaaaaaaaaaaaatcaggttagctggagtcagggattaggtaatacggaatgcagaaatagtgttttcttacttagatcatgagcataaaagcactttgtgagatataatgctattcaaatattactagcatcatttccattattctggattgaacataagaaggaacaaaagagaaacaacaaatagcagtcaatagggagaatgttaaatcctttggtaatacctattacatggagaaagttaaaacagacaaacaaaggtccttattcagctaggaatggtggccagatcagggtcattgaagtctagtttcttttctaaccctgacttgctttgcagtatttggtaaatcacttaacctttctgcggtacagtttttccaatccgttaagtgtctattatagtactttctccttactctcgtgcaaggatgtttgggtgattcatttgataatcctgtaaagtactttgagtcccatagagaaagccagggacacaagattttaactgggattattagttagaaagtctttttgccttggttgaatctccgtttttcatttgtagctcacctgcttttctgtggctttcccagttccatccttgttcctgtacacaactgtgagggtgtaatgataaccaattatatatcccaaatgatggggctatcattagattaactagttgggtagatgtagaaaaattagaaaagtgagaagattttcagcttgtctgcagatgactaaggaaaacacttagagtgggtgcagtggagaaagattattagccagtgactgaaatcaattaggaacctaaccaaaatgttgttatgttcgttggcacttgaccatgacctttttgccttcctaaggaaaaataataactggctccaggtttaaagaagcttcatagtttacattgcttgatacattaaattttgaatacgttttgatattggtccagttttacaatttccttcgaatgacagaacctttacggaggacaatattagcacctctttatggagcaactgaaaaactgcaataatatctccaccatatacttttggaggattgagaaaatgtgtcatcgcttggaattcctaatcttattttattcattcaggttgaggaataatgtaagatattgctccactgtggctttatgaaattttttacttaaaaaaatccaaagcatgtaagtatttatctcatggcttaaatgttcatcactgtaaggagaagtttaagattggaatgtatctctagccttgctctctctccccctgagatctggctttatactttacagcagtaggtttgcaaatcaaaatgccagcttgacctagctgccagaaagtcctgaatatgaatcccacaacagaatttattaattttcctttacaagttggtaatttcttattttctcttaagtaatgctaatttcgggtacacccttgccatgagggaggttctaggtctccagtgttattgtcatacactggcatgtatactgtcatctctactggtattatataatgttgttgctggtacaggctttccccagaatttatagagatggagacaacacgaactaggcatcatcagtcacagcaactcagtttatagttattgaaggaattgttgaaggaactcctgagtcagtctgtaagtgaaatcacagacatgtaaaataaacacttacattttagattatatgatgatgctaaattttctttaagacattggagaattaatgtgggggcaaagaacagggcatgacaggagaaagggccaactgggtccctctccatttacaatgagtattatctattttatatttaatttttatcttttctatgaggcatagttttattaatttcagttatacaccataggcaaaaaaatgttcccagttagagatcctgccaagcatctctaatcaatgttgaagccctggtggaattaagttggttgctttgctttttaatttttttaaaaaaataaatagggtatatgggcttgttgtaaaataattcaaacagcaaaattgcaaagtagatgtcatctgatgtcatagctgttcttcccctagccatgcagtttcactgcttttgaaactccagcccccttttcctaggctagctctgttgggagcctttcagaaatcttttctctgtatacacacacgcatgtgtatgttatgtacatatgtatcaatcatgtctttatttatatcgctgctttatttcagtcaggctgctataacaaaatgccacagattgtagcttaaacaatagaaatggatttctcacagttctggaggctggggagtccaagatcaaggtgctggcagatttggtgtctgctgagggcctgcttccttcatagatatctgttttcttgctgtgtccacacatggtggcaggaagggcaaaaaggctctctgaggtctattttatcagggtgttaatcccacgtgctttgccctcatcacttaaacacctcccaaagctccacctcttaatatcatgattttgggagttaggtttcaacgtatgaatttgggaggacataaacattcagaccatagcaatcacattatacatattgcatgtcaaaccttatatatataagatatatctttttaatttgacaaaaaaggatcactttccaggtactattctgtaatctaccttttgtgctttattatacatcgtcatcatatttctgcttcagtgtgataaatctattgtatttaccctaatggctacaaagtattgtcctgagagatatcctaatttatttttttaaatgattcccaattgactggccttaagttgcttctattttcatagaagcaataattatcataatgctacaataaacattattgtacatataacatttttgcatttggggagagtatgtatattgcaggagaaattcttagaaatggaatttctgggcatatgaattttcaaaaatattgccaaattaaaaaggactgcatatatttactctcccactagcactgtgggaaagccttttttttttttttttttttttttttttgagacagagtttcactctgtcacccagactggagtgcagtagtgccatgtcggcttactgcaacctccgcctcctaggctcaagcgattcttctgcctcagcctccggagtagctgggattacaggtgcaccactactacccagctaatttttgtatttttagtagagatggggtttcaccatgttggcgaggctggtcttgaactcctgacctcaagtgatccacctgcctcggccttccaaagtgctgggattataggcgtgagccactgcactgtgcccggaaaatcttttttattcatgtctttactaccattggtcagctaagccagaagacagatgacagagggctggtctatttttgaatattgacagagaagaatgagactctgggctgggcgcggtggcccatgcttgtaatcccagcactttgggagcccaaggtgggcagatcacctgaggccaggagttcgagagcagcctggccaacatggtgaaatcccatctctactaaaaatacaaaaattagctgggtgtggtgatgtgcacctgtagtcccagctactcaggaggctgaggcaggaaaatcgcttgaaccctggaggcagaggttgtagtgagctgagatcatgccgctgcactccagcctgggcaacagagtgagactcggtctcaaaaaaaaaaaaaaaaaatgagactgatcaatgttgctttgacttcaatttactactaaaacagctagcaagaaagggaaagggtactcgctagaccagtgggtctcaacacctggagcagcagcagtagcaccacctgaaacttactagaaatgcaagttctcaagtcccatcttaaatctgaatcagaaactctggtggcagggcccaggaatctgggtttaacaagatcttgagctgattttgatggtggcccaagttggagaattactgcagtacagcttgatgaaagtgagaatgcagtttcccagtgctttccttatgcctcttggaggtgaacctggagtcctctgctttaggttgaaggtacccagggctttgtactccctgcatctcaccccactggggtggagcaggggacccactgggattcagtgtattacttactttcatataaggcaactcttgttgtcccatagttataaagctctgtgttctgtttcttattgtattacgtgtacgtggacatgccaaacattaacaaatatttggcttcttgtctatctgaaaaatggcccctcatttctatttaacatgaatttctttaattataagtgaagttgagcatcttcttatttttatgggccactttgcacgttttcctcttatttattactttctatatttgtcatattttctattggttggttgtctttttaaaaaagaattaaattgtaacagctgttttaattctaaggaaattagcctttcatcatttgtgttgcaaattcgtttttacctactttgtcatctatcatttaaatttagttacaatacatttttgcatcacagagagttaagatttttatgtagtcaaattgataagtttttatgtgtctgaattttgaattttatgtatgcttagatagatcttcccaaccctaggataattaaaaaaacatattttttcctaaactttatggctttatttttagcatatacatctttgatgtgaatggaatttattgtgacttaacaactgaagtatacatattaacttccatttccaatggaatatcattgattgagattataattaacttatagctcaataaaaaaagagttttaacccagagttttcctaaccaagaacagagtatacctttacagttacttattttttcatttttttttccttcgggagtgatttaaaggttctttatatagttattacatatgtattttataaacttttggaatgtgatgtttcttattataagtaacctttctactaattatttgcatataataaagctcaattttttttgtgtattgatttcataatcaccttactgaattctcatattatttttattagtatagtttttagaggattcttaggagttttccaaggcgatgtggtttggatctctgtccccacccaaatctcatgtttaattgtaatttccaactgttcattgcttgtaatccccagtgctggaggtgggcctggtgggaggtgatattggatcatgggggctgatttcctccttgatgctgcttgatcatgagtgagtgctcatgagatctggttgtttaaaagtgtataatgcctcccctctctctctcttcctcctgcttcagccgtatgagcataactgcttcagctttgccttttgccatgagtaaaagctctctgaggtctctccagctatgcttcctttaaaacctgcagaactgtaagctaattcaacctcttttcttcataaattacccagtctctggcatttctttatagcaatgggagaagagactaatacacaaggttgtaataattatctatgaataatataaagcagcctgtttttgaaattagacttctgttatggagtgaatattatggtggaatatgacctttctaaaatttttctgttcttaaaaacatcatcttgggctgggtggtggctcatgcctgtaatcccggcactttgggaggcctaggcgggtggatcacaaggtcaagagaccgagaccatcctggctaacacggtgaaaccctgtctctattaaaatacaaaaaaattagctgggcatggtggtgggcacctgtagtcccagctactctggaggctgaggcaggagaacggcgtgaagcttgcagtgagccgagattgcgccactgcaccccagcctgggtgacagagtgagactccgtctcaaaaaaaaaacaaaaccatatcatctttaatgaagtaaatgtcatacaacaaaattgaccaattttacatttgtaattctgttttaatcatgtagtacagctgtataattaccacaatcatcatataaaacatatcaatcctgccagaaaattctctcctactcctttcctgtcaattgcttctccctatctcttgttcctggtaccactaaataacttttggtcattgtagttttaccctatctagaattttatataaatagactcatacggtgtgcagtcttttgtgtctcacttttttcacataatatatcatgatatggctatacaataatttgtttatattcactagttgatgaacatttgggttgtttacaactttttggctattaatgaataaagaggctattcatgtacattcaagtacatgtcttgtctgggtgtgtgttattatttctcttgggtaaatacttaggagtgagcctgctgagttgtatggtaagagtatatttaacttgggccgggtgtggtggctcacgcctgtaattccagcactttgggaggccgaggcgggtggatcacgaggtcaagagatcgataccatcctggccaacatggtaaaaccccatctctactaaaaacacaaaaattagctgggcatggtggcgtgcgcctgtagtcccagctactcaggaggctgaggcaggagaatagcttgaacctgggaggcggaggttgctgtgagctccattgtgccactgcactccagcctggtgacagagcaagactccatctcaaaaaaaaaaaaaaaaaaaagtatatttaacttaataagaaactgacaaacactttgtatgactctaccattttgtattgccatcagcattatatgagtattccagttgcttcacattttcaccagcattttgtattgctatctgctgaatgtgtccccaaaagtcacgtgttggaaactgaatgcccagtgcaatagtattgggaggtatggtctttgagaggtgactgagtcatgaggactcttctttcaagaatggattaggtctcttataaacagggcttacagaagtgggttcattctccttcattcttctaccatgtgaggacacagtgttccttctctctggaggatacaacattcaaggtaccaccttgaaagcaaagaccagactcttactagacaaggaacctgccagcaccttagtcttgaacttcccagttcccagaactgtgagaaaataaatttctgttattcatacatcaccgtttcaggtatttttattatagcaacacaaaaccaagatgggtattgtcttttaaaaaaaattctagtgagtgttttgtagtatctcagtgtgtttttaattttcattaccttaatgaccgatgttgctgagcatctttgcatgtacttacttatcatttatagatattatttgatgaagtgtttgcttgaatttttttgtctaatttttattggtttgtcttactgagttgtaaaaattctttatatattcttgaagcagatcctttatcagctatatgttttgcaaatgttttctcccagtctctgtgacttgcctttttattttttaaatgatactttttgaaaagcaagcttttaaatattttgaaatccagttcgtaaatttgttgcttttatagtttatgctttttaaagaaattgagtgtaacccaaggtaacaaaaatttctcctgtgttttattccagaaattttagttttaacccttacagttaggtctgtgttcctttctgagttaaattttggatatagtgtgaagatgaggattaaagttctctctcttcttttggtatataaatatccaatttcccagcactatttgttgaaaatggtatcctttccagagtgaaatacactggcacctttgttgggaatcaatgagccatataagtgtaggtctatttctagattcactattctgttccattgattcacacgtcaataccagatgtcttgattacttgagcattataataagtctaggtgtaagttttatagtaagcctgagtgtaagacttctgactttatttttctttttcaaaagactttcaactttactttttcttttattttggctatgctagttggttttcatttctatgtaagttttagaattttcttgtaatttctgtggaaaacactgctgggattttggaattctgttgaatctatagatcagtttggggagaattgatattttaataattttgaatcttttgatttatgaccacaatatatattttcattatccagatgtctttaatttctttcagtaatgtttagtaattttctgtctacatgttttacaaatattttgttaaatttattcctctgtttttcatatttttactatatttttatgatatttgtttaaaatttccaactgttcactgcttatatatgaaaatgctactgatatgttgactttgaatcttgtgaccttgcagttagttctagtagatgttttgaagatttcttagaattttctacatagacaataatgtctgtgaataaagatagttttatttatttatttatttatttatttttaaaattttttggaggccttgtggatttgaagagttttttttctttccagtcttatacctttttagtttttttaaaatttttcctgccttatattgtattgataagaacgttcatacaatgttgaataggagtgatgagagagaccatccttgccttgttcctgaccttagagtaaaagcattcagtgttttgcccttaagcaggatactgtttttagttttctcatacttttttttttgaaatggagtctcgctctgtcacccaggctggagtgtagtggcatgatctccactcactgcaacatctgcctccccagttcaagcgattcccctgcctcagcctcccgagtagctgggaccacaggcgcccgccactatgccaggctaatttttgtattttttattagagacggggttttgccgtcttggccaggctggtctcgaacacctgaccttgtgatctgcccatctcggcctcccaaagtgctgggattacaggcatgagccactgcacccggcccctatagatgccttttattggattgaagagcttttattttattcctagtttgctgcaaatttttttttttattattacaaatgggtgttgaattttgtgaaaacttttttctgcatccattgagatgatcatatggtaagttccattttagacaattgatatgatgactcattgtttttctaaggttaaactaacttcacattactaggataaaccacactggattatgatgtattattcttttaatatatttcaactgactgaagtattgttaacatttttatatctatgtttataagggatattagtctttagttttctttcttataatttcattacctttggataagttaaaaacatttcagtcgtattttagtttttccactcattacatttaagactttaaataaacatacactttaaactctatttctatatatatcaactttaaataatatattctggagttttaattttaggtaggatggagtaagcacactcctccatctctgagtgcacactcctccatctcttagtacacactgaatacagctaactcattaaatatagctttaaaacctgggtataatgcgtataacagtgatataaggacactggaaagtaaacagtagcaagaagattgggaagaagaccagaatttaaagttttatgaaatgccagttagtttatctttttttttttttttgtaccactatcccttggcatggattcaaggtagtctgaaactcaaaacctgtacatagacatggcatggataaggaacaaattacagacagagctccagaagaggccctatagttttgacttaagcagtatgaagcagggctgggggtgggaggcatcacttaatctccagagacagtgagggcaatccatcatttttattttctttttctctatgtttccttgtaccatagtccccaggcaatgctgtggcaatgacagcagtggcctactggacctgcaaggggctaaaagtctgagctgggggggtcccttcctcttcatttggagaagactgatctcaacagagtgatatgaacactcattgattttttttccctctttttatcctcccaccaagtggcctcatatgtaggacaattgttggaagagcatggtagagcaggataattgaagccccagctctttgtccagaggactgaaagggtagccccaggaaactgaagagtatcagcaagatgtggtgagaaaggacctcagggaaatgactccctgaaagtagcttatgaactctcaggcttgctccttagatacccacttacagatctgattctaaacaacatatcaacgactttgaggtctgagctaaggaatagatcatcacttaatttccatattggccaccgggtgacataaacaggagacagatcagaatagcactacaaatgctttgagggaagaaaacaaacccaaaccgatattgaaactacaacccaggaaaagtcagttggaatttgtggcctgaatctaactgggtcagctgctgaaacaaaacaaaaatatcagcattctccatgggatttaaataagacccagagtcttatattattcaaatgtctgtgatatgatctaaagtaacttggcatcttaagaataagaagaatctcaactcttatgggaaaagatagtcaacagaagccaacgcggagatgacacacaggttaaaattttctgacaaggtctttaaaagaagaaagggtgaatacatttgaaatgagttgaatgaaagataattttagcaaataaatagaagacttaaagaacatccaaatagaaattttaaactgaaaaacataacaatcaaaataaaaacctctccagatggtttcaatagcagaatggagatggcagtggaaagggtgaattctaagaaaaatagaaattatacaactgagagaaaaaagatgaaaaagaaaacaaacagagacttagggatctatggaactctaccacaatgtctaatacttctgtcatcagagtcacagagggaggagaaatattgttgtatagaaaaaatatttgaagaaaaatgtttataagtcctcaaattgggcagaatttctatgtagctcctatagattcatggaacgcagggaaacccagacaagataatcctaaagaaacatgtttaggcatatcaaaagcaaactgttaaaaattaaagacaaagaaaaaaaagcttgcaggcagctagagaagcacaactcattacttataactgaactatgattctaatgactacacatctctcatagaaaccatgactgtcagaagaaagtgaagcaatatttttaatgtgctgagagaaaaaagtgtcaacctagaactctatatacactgaaaatatccttcagaaatgaaggtaaaatagagaccacagatgaaaaaaaactagaaaataattcattgccagtagacctgctctgaaagaattgctaaagtaggtttttcagacagaagaaaaaatgataccagaaggaaacttggaacattaggaataaataatatcttttaactctgatatgaatggttaggaaattggcacatacatcctcctttctgatatctttttttttttctgccagtgtccattttttcttagctatactcttatttatacatttcaatgtctataaatttgcacaattgtcaagccttacttctatgttttaatcaattcagtgcaaacaatacttttatgccatgaattcttcctttctcaagttcttttgatgacagcacttgtttggtgagaatttgttatcaagaggttttatatcccttaagaaggtctgtctataatcttttgactcacaattttggatactaaatgttggtatgaagaaatctgaggtcactctgattttcctcccatgcaaatgaattgctttttctgagtgaatgctcattcagcttttatttttattcttaaaggtaaacagcatcaccagaatatatcaagttgattactggaatgaattactttttcctggaacatgatgaatccttttcatcctcagacccagatgttcctttatttcagaaacattttcttctatttaatttttaaatattattttctgattgatttgcttgactcccagggttagtcaagtttatgccaactttatttggtctctcttacatatctatcttttaaattacttttgcttctttgttttttgcatttaagttttcagattttttttttcttcttttctgagacggagtctcgctctgtcgctcaggctggagtgcagtggcgcgatctcagctcactgcaagctccgcctcccgggttcacgccattctcctgcctcagcctcccgagcagctgggactacaggcgcccgccaccacgcctggctaattttgtttttgtattgttagtagagacggggtttcaccgtgttagccaggatggtctggatctcctgacctcatgatctgcccgcctcgacctcccaaagtgctgggattacaggcgtgagccatcgcgcctggcagttttcagatttttatcagcctttcttctatgctcccgattcttttataaattgtattacattgtttttgtgtctctatattgcgtttatgtctatggtatttgtattattaacttttgtttcttttgtgaactctggtagcttggtttcactatctttatttcctctttaatttcatatcccttctcagaaagtctccttttcagatcgtttttttccctctttagtttcttgagcgtgtagactattatttgtttactttttttttcatttcctgtggtaattcttctgatacatattctttttaagtgtttttcttctatatttataacaattgtacaggtggtaaattatacatgccatagtactatagccaggtctgctccttggaaagtctttatgtaatatggaaagaaaatctggaggtgggagaattagaaatctgacatcagtagcaggaagattggatctagatgatggggagacacagggtggttacttcattgtgtaaggcagagattggggctgggatgtgacactctgagttggtaggaaaaagagcctgagtgtaaagagaagaacaaggctgatctgagtagcaagaccctctaccctaccttactggaataagctcatccatgcacagaaagctgtaggaaactgtgcacactgctatcaagtatagttttgaatggccaaattatttatttgatgttagttaagcaaacagtttttaccaccgtgaaaactttttctgcctctatcatttctgctggtctccatatagtcccattaaaaaaaaaatcaagcaataaaaaatatacatactaaaagtgaaagctgatcttaaacttcctcccagtccttcacctccttcctaagaagtaactactatttaacaattagctgtgctgtgtctacatcttgaccttttcctgcgtatgcttatacataagaattttctgtctttactaatatatcttttcaatctttctatgccagtaaatatttttctactacaaaaatcatttgtatagtattatatactattattgtatactatatattgtactatatattgtatactatatattgtgtagtattatatacctattatttatttaactatctgctgttcttggtcacacatttaccctaaaatgcagcagtgaacagtcctctatgtggatattatgagagtttctgtagcatataatcctagaagtggattttgtgggtataagaatatggacagataaaattttgataagtactgagaaataatacttcaaaaagcctgttccaatttactgtctcattaatgagtctattttcccacatctttatcaaaagaatattattctgatttttttatttttgcccattagataagttaagaattgtgactcattacttataaaatttgcatactaccaactgcagtggaatttcagcatattttaaaaatactctttgacccatttcttttgtaaatttctgtctatttttagtagcttttttcagttctttttggtttctagaggtcctttatattggttattaattgcttctctgttgaagatgttggaaatattttctcagtctctcatttttgaatttatttataatctttctattattcaaactatttgaacctttatatagccaaatattttaactttatggcttttatatctttgcttataagaatgttctctaaggttaagatgaagtttgcctatatatttttttctgatatgtatgtagttattaatgcttttaatgttttattgagcttagtttttaatctgtctgtaaataattagcctcttattttgacactgcttattgaattgttggttctttttcctctaatttgaaatatcacctgctttatctttccatattgatttatgtatctactctgggaccagtgccacactgttgttggtatttagaatggtcaggcaagttcttcctcattattcctctcttcaaaattgtgctggctatttcgtttcaagccatctgtttagagttttgattggaaatggtatcaaatttatacataaattcgaagagaactgatgaaacgggaaagttcccttattctcctcacagggcgtgtgacaggggcatgactggtttcttcagtgccccactgcccaaagccctagagggaacatgcagacagtcaggtcggggggcgtctagggttgagtgtttacagctctcaaagccccagtgggcatgtgttacagtgcactctttcagttttgccatccacaggtggcttgtattaatcagctcaattacagcctctgccttattgcaaggacagagggctttctgtatcccggggttcttgccctagagtactggaaaaatcggatcacatgtgggcttggaggatgggtgcaaggttttattgagtggaggtagctctcagtgaggtggatggggagggcaaaagggggatggagtgggaaggttgtcttcccctggaattggggtgcccaatggctggacttccctccgactgaatttcccatattgtctgcgtcattctgctgttgatggcctgctggcatctgctggtgtgttcttctgccagtgtgttcctctcaacatccagacacttgtgtgtgcgcccgctagggtctcagagattttatgggcacaggatggaggatgtgatgggccagagtggtcttggaaaatgcaacatttgggtgcagaaacaggagtgcctgtccttacttaggtccctgggcacaggcctgagagtgaagccctcaccagggaccctgcccttctctatccagcatttccctatctccctcctgtatcactgatatcttttactattgagtcttcacatccagaaacataatttggccttctgttaatttagagcttcttttattttcttctgtaaaaatttacagcattctttatattatatgtttcttattgaatttaattatgaacaggttatactttgttattatcatgggatcttttaaatacattctaattggttatgacaggtttaaaaagctactcttaatttttctgtgttgatcttgtatcccaactaaatcctgtgtttgttctaaatgcttactagtagtgcctcttaggtgttctaggtggctactcatagcgtctgataacaataatagtttgtctttttctttcctatatttacaccaatttttttctcctaacatttaaaggttttttttttttttcagtttcctgtaatgattatttattgaatttggaagatctccattgtggtgttaatttcttaaaagcttagtgtttcttgcttgctcttatttgttgctgaggacttagattaaacagtttattgcttttgaagtatattttgtcagtccagttgagggactgagtctcagtccagatgagggactgccagtttgtctagcagttgatacaaactaattacctctggtaactttgcaggagctgaaaacagaagtgtgactagtaaggtgtgaaggtggcttgatttctagatatgaggctcttggtgcttgttggctgacagacactctccctttctttagttcagcagccactctggtagtcttaaacgtcagagtttttaagaggggtattcatagcccaaatctagggataaatgtaggagatggaggaaaggggagttgccgttttattggtgccactgtttagttaaaatacctaaaacattttctcattcccctttttcctgcctccactgcctttggatgtagatttattctggagttctgttgggaaaacacactattttggaatgttttacttgtctactgagagggttcttcggctattttggactatgttgtcaatctatttgctattgctgtgtcacttctagaaactcctcattgtcctggactactggcaaagcttgttttcaatgctgttatgaatttgctaatttatttcctttgtatctattgtatttatgcacagactttatgttagatccttttggttgattgttatccttaattagggataatgccatctggacctgttaatttgctcaagaactgagtggagaggggtggatggaggatgacacattactcactatttaacaaaataaaggtttttttccataataaagcttgttatataacaggtaaaaaatacagaaaaacaagaggaagaaaatgatcattcataattcagtcatgacaatcactgctaatatttagatatgttagcagtgatatcatattatatatatatattagatatattaaaggactatcagtcctctcctgatgcatatttaacattcttgtgattatattctgtgcagcattttgtatttattttttccagttaacattttaacacatttcctgtatcattaggaacactcatgattaaatccttactttaataatatcataagatagagtaaaatggatcctccaagggtgatacttacttgtctttggccatttgggttaatttggtatttagttcttttaagaaggaaattcgatttttatacatttattattaaattttttgaaataaaatctacagtgaaatgtatagagcctaagtgtctaatttgatgttttgataatgcttacatttaagtaatcatgaccccaatcggatacagcatatttacctgactcactttttaatttaatttaatttaatttttgagacagggcctcactctgtcgcccaggctgaagtgtactggcacaatcatagctcactgcagttttaacctcctgggcttgagggatcctcctgcttcagcctcctgagtagctgggactacaggggtacaccatgtctggctaatttttttttcattttttgtggagacagggtctcactatattgcccaggctggcctcaagtgatcctcctgcctcagcctcccaaagccctgggattacagtcatgagccaccatacctggccaactcattttaataatgtctaatgatgaacacctataagaaggtttttcatatttatgtacttggactgtgattctaaaagtgaaataacttggctttattttacaaaccttttagtggactttactaaaatcgcttccagaagtttgtatcaatttacattcccaccagtaagtggagagtgtcaatctttttttctgtgatccccctaacattttttgactatcccccagcagataagctgcacagtttcttgttgaaagcaagttatgactctttctgttaatatctacttccactcaatcatggttgtgtgtgtgtgtgtgtgtgtacgtgtaaaccatcactgttcatgcattcagtggtgttgtaacatttctcccacaagcaaccttcattggcattatttatttatgacagtgtcttcctcatgaaatcatgtctcagtagctcttctctgtcttctttcaaagactgtggtatttctagtcacacaggctctaaaattcatgagtcccaattaatgtctcttttgctccaatttattccaactcttgttcattctgttttcctggctcacagctcttcctactctgtctttccattttcattctcattgccttattttagccctttatgacctcttacttaaaaaatttctatagcttatacctacactttctccctacgcaaatctgtctgacccatgattgctagattaatcactccagagaatttgtgcttaaatattgttactcaaaatactttagtctccactcaaaatccttctcctggggatgtcagcaacatggcagaacaggagactcctgactattccatctctcacagacatacaagtaaacacctacacatgaattagttctctccaagaggaagctagaatccagttgaaagtctcccacacactggaagactgagaaaatacccacatccaaacaggtaggaaaagcagagacacacttgcactaatcctaccatgagcacaacgccttataattaggaaggaaactccaactcccagcttcttccagaaggttgggagtcttgtaccacatgtatagtgcccaacttttacagttcctgtgggagggctttgatcttaagttaccatgcttgaagaacagtagggacagtgcattggaggatttctctcaagcacaatggacaaaggggcttttgaaccatgtgaggactcccagctactctagcccccagggatcagcccaacttctaacttccccctaaagagggttcagcctaagacttttcaaggaactccctgtggctctggcttctaacaagctggtatctgggagtctaataaggagcctataaggattaaacttctttgagtctaaatcagaaagaaggcactccctgtgccttctccccttgctgtctcctgatataaattcctgcaatctctcattagaaagagaagggtgtacctctccatgtctgaaaggaaaagggggcactctctattcctctaccctggcttgctttcacgataagatcacacaaggctccccctacaaggagggtgtgaaacttctgcttgcttgaataggagagtgggcatcacttgcactttcttccttggcttgttccagtgacgatttcagccctacaatatctccatggaaagaagtttgatgcctccaccagcaagaatgaaagggatggcactcctcatgctctttttctcagtttgctcaggagataaactcctgaaatatctcattggaaggagatagagggacctctccatgactgaaaaggaaagtgagaagtccctgacccttctgctctggcttgtttcagcaataactccagaccagaagcctgtccctactagaagagtgagagacttttgcttgcatgaacaggaaagtgggcgttctctgaaatatcttctctggcttgctccatcagtaaatacagatctgcaggtcctggaagtagtttctgcaagcaccaaggactccatcttttacagtttccaacaaggtactggcttctaaattacctagatcttggagttaatggagctctacattcctgagtttcctaagttacagagaacataaagatgacttttaaacatgcaaattttcagcaaatatttccacaggtccaaagtgagaagtctgatcaagaatacaagtatctctctcagtcactcaccttgtgtacagcagaacaagtgtgagataaactctggctgtcaacttctctgcaaagaaagaaggaactggaacatatcttacacctcaacctcttcagctgcattctaaggaactgacttctatcccacttctctcaaggcaatagcatgacttgacactctctaatttctttggggacactaagaacaaagacatcaggttagatgagtacaaggagtttggaagcaccaggaatctctggctgggctgatgggggagaaacatcttttacatgggaccagtctaacaaaattgagagagatggttcttttatctaatgcatggaaacaaacatgagagccaaggaaaaatgaagaaacgtggaaatgtgttctaaatataagatacatctctggaagccaaccccaatgaagtggagatatgtgatttacatgacagggaattcaaaaggacagtcataaagatacttactgagacaaggagagcaatgcaagaacaaactgagaactttaaaaaaagatagaaaatataaaaatagcagcaaacaaaaataattgagctgaagaatacaataatggggctcaaaaatttaatagagggtttcaataccaatctatataaagcagaagaaagaattagcaaacttgatgacaagtcattagaagtcatccaatctaagaagtcaaaagaaaaaagaatgaaaaagggtgaagacagtgtaggggatttgtgggacaccattaagtggaataatatatacattatcagtgtaccagaaggagaaaagaaacagaaagggacagaaaacattcaaggaaataatggcagaaaatttcctaagtctggaaaagaaaatagaaatccatatccatgaagctcaatggtctgttataggataaattcaaagggacacacaccaagacacattacaatcaaattgtcaaaagttaaagacaaagagaatattgaaagcagtaagggaggagtgacttgttacatacatgggacctctagaagactgtcaatggattttccacagaaatcctgaagggtagaagggaaagggatgatatattcaaaactgaaataaaaaaaagaaccctgccaaccaagaatactatacccagcaatcctgtcccttaaaggtgaagaagagataaaaactttctgagacaaacaaaaggtgagggaatttatcaccattagacctaccttacaagaatgctaacaatagtccctcaagcttaaggaaaaattgttaagtagcaacatcaaagtatattaaaacataaaacttactggtaaaagtaagtatgtagttaaactcagaacactcttagattggaacagtggtgtgaaaataaattttgtttctagcatgaaaattaaaagacaaaactataaaaacaactgtagttacactaacttgttaagggacacaaactaaaaattacaaaacatgtcaaaaaaacaaatggagaggaataaaagtatagagtttgtgcaagtgatcaaagttaaatcattatcagcttaacaagggatgttcttagcatatgatgttttatataatcctcatagtggccaaaaaaaaaaaaaaaacaactccttagtggatacaccaaagataaaaagaaaggattcaaagcatactgtgataggaaatcatcaagccacaaaagacaaccataagagaggaagagaggaacaagtaatctacaaattaaccagaaaacaattaacaaaatggcaatagtaagtctttatctatcaataattactttaaatgtaaatgaactaagttattcaatcaaaatacatcaagtggctaaatggattaaccaaaaaaaagactcagtgatatgctgccaacaagagactcatttcatctctaagaacatacatagaccaaaaatgaagggatggaaaaagttattccatggaaatagaaatcaaaatagagcagggatagctatacttatatcacacaaaatagaccttaagtcaaaaactataaaaagaggtgaagaaggtcattatatgacgataaagtggtcaattcatcaagaagatatgacagttgtagatatgcatccatccaaagttggaacacctaaattggtaaagcagatattaatagatccaaggaatgagatagactgtaatataataatagtaggataactaaatactacacttttaacattggacagatcatctagacagaaaatattggacttgaagtatgctttatttatttatttattttgagacagggtctcactcttttgcccaagctggaatgtagtggcaagaccatggcttactgcaacctctacctcccctggctcaagtgatacccccacctcagcttcttgagtggctggaactacaggcatgcaccaccattcccagctaatttttgtatttttttgtggagacagggttttgccatgttttccagtctggcctcaaactcttgggcttcagcaattcacctggcttggccttccaaagtgctgggattacaaatgtgaggcactgcacctgccctgaactacgcttcagatcaaataaacctaacagacatttatagaacattccattcaacagcaagagaatataaattcttctcaagtgcatctggaacattctccaggatatatcatatgataggctgaaaacaagtcttaacacatttaaaatgattgaaataatattgagtattttttctgaccacaatggcataaaactagaaatccataacaagaggaaccttgaaaaattcccaaatatatgagaattaaacagcctgtttctgaataactgatgggtcaaaggggaaattaaaagagaaattaaaaaatatcttaagacaaatgaaaatggtaacacaacatatcaaaatttatggaatgcagcaaaagcagtcctgtgagggaattttatgacaatacatgcctacatcaaaaaaggaaaaagatttcaaataaacattggtagaaacgggatatccacatgcagaagaaggaaattggatcattttcttacaccatatacaaaataaactcaaaatgagtaaaagatttaaatgttaaggcctgaaactgtgaagttgcttggagaaaatgggaaaagctccatgttgttgatctgggcaatgatttcttggacagaactccaaaaaccacaggcaacaaaagcaaaaatagacaattgggattgcattaaattaaaaagcacagcaaaggaaacaattaacagagtaaagacacacccatgaattggcagaaaatatttgcaaaaacttagacatctgatgagggcctgatatccaaaatatatgaggaactcaaaccactcaatagtaaaaaatcaaactgattaaaaactgagcaaaagatctgaatagacattcctcaaaagagatataaatggccaacagatatatgaaaaaaagttcataatatctaattatcagggaaatgcaaattaaaaccacaatgagatatgacctcacagctgttagaatggctattattaaaaaataggaatgataaagttttgatgaggaggtggagaaaagggaactgtttattggtatgtaaattagtatagctattttggaaaagagtatgggagttcctcaaaaaacgaaaaataggattgccatatgatccagcaatctcacttctaagtatacatccccagaactgaaactgatatgtcaaagaaatatttgcactcccctgttcattgcagcataattcactatagtcaaggcatgcaaaactcacaaaagccaaggtatagaacaaatgaatggtttaaaaatgtggtaaatatacacaatagaatactatttagccttaaataagaaggaaattttgccatttgcagcaacatggatacagccagaggacagtgaatgaaattatccaggcacagaaagacaaatgctgcctgatttctttcatatgtggaagctaaaaaagtcgaccttacagaactagagagtagaaaggtggttaccagaacctggagggatggggaaaggaaagatgtcgatcaaagtgtccacggtttcagttagactggagaaataaattttagtgttctattgcactttatggtgaccacactaaaaaaaaatgtactgtatatttcaagtttgttaaaataatagatctttaacattctcaccacaaaaaattagtgagttgatgaatatgttacttagcttggttgaaacttgaatgtatacatcaaaacaaaagagcatattctataaatatagatgatgattatttgtcagtttttaaaaattgaatcttggcatttagggccctccatagtcttccatttttattcctctttatctctttgatcatatctatattctagccagagagaacacttgttttaatcatatttgacacaattctctattgttctctgctttagtcaagtttttgccttttctggagtactttttgctcctccatgatttaatttttcaaattttaccttttctcaaaattcagtatagatgtcatttctttcacaaaattttccctgttaagcccagaaaaataatctcttttccctctgaatcattagggtactttattcatttttgttttgagtgttattttcttaccaagaaaatattatttctttcagtattatgttgaattatgattcattcactgtctaaacctccttattgagtggaaatttctatgagggcaagttacaggtttaaaattatttatttatttttttcaatatcttgcacacagcagaaaattggcaaataaatgtttattgtctgagtcgtactggggagaggaatggaatttggagcaaaggacataacttatttgaatatattggaaaacataccaatctagcatttgttctttaaaaaaatgagttcacaagtgagatatggagcaagatttttagaggttcaaggactgacacatttctgtgggatattctggtttgacttccaaatcacctctgggtcaagacactggaggtgttttagagcttaaaatagaaactcggagctcagtgaaaaaatatatgatcgattattgctgcaaatgtatagaaaatggaattagcacatgcccgtagtatttcaaccatgcttaaagacagtctttctgttgccttaaccccttttgaccacagatggccgtattaagaaaatatttattaaaaatcacagaggtctattcttcatctgctaaactggtagattttaaggatatggtcccttctccatggtgctttaatatttgctaaatgtgtatgtgcacacatgtgtgtgtgcacttcacatcttatccgggcatattggaaaccttgtaatatagtttttgtttatttttaaccttcctctctactgccttccactaccaccatttaaatacacaaaactgtcactgtgtgagatatggccattatgttgctagctcttctgtgatgtttataaaatatgtcaactccctatagtgaattggcattgttttgctctcccacttcctatcaacgaaaaaaagcaaatgcccccaagtaaataatctaactcattaaccctcactgcattacagagatggaaaaatttatcaataataagagctgagcatcaggggaagatgctttatcttaccccaaacctggagactcatcccggggggcaccaggtctctgcagtagctcccatctccttgcccatactcttactctccacctgcaccattcatctgaataaattagcctcactgagaggaagatgacagcaaagagcgcacctgcaatgtagtgtgactgccgcagcttagtaaggggtttccagggaagcggtttctaaaacacaggggaggagaattgtcagggtttggctccttgtgaaatttgcctgtcagaacagatgatgcgtttgggcataacacactccagtttgttcttctggcagtttctcttctcaatttcaaggctttcacagttttgctgcaacttatccttttaaggggctcttcttctcccatttctccattgactgttggtccagagaggtgagagattatgttgaaattgtctgcttaggactgatttgctgtagaatcaggccaatcacaacaacgggcccctccagcatctgccctcactgcccttgttttcagggcaccatccccccatcctccggtttgtctggaattggagggggtctgggggactgatgttccacaagccatgatcagactagttcagagggcagtgggctttttctggaaatg

SEQ ID NO: 80 - DNA, 1469 bp, Homo sapiens
tggggagaggaatggaatttggagcaaaggacataacttatttgaatatattggaaaacataccaatctagcatttgttctttaaaaaaatgagttcacaagtgagatatggagcaagatttttagaggttcaaggactgacacatttctgtgggatattctggtttgacttccaaatcacctctgggtcaagacactggaggtgttttagagcttaaaatagaaactcggagctcagtgaaaaaatatatgatcgattattgctgcaaatgtatagaaaatggaattagcacatgcccgtagtatttcaaccatgcttaaagacagtctttctgttgccttaaccccttttgaccacagatggccgtattaagaaaatatttattaaaaatcacagaggtctattcttcatctgctaaactggtagattttaaggatatggtcccttctccatggtgctttaatatttgctaaatgtgtatgtgcacacatgtgtgtgtgcacttcacatcttatccgggcatattggaaaccttgtaatatagtttttgtttatttttaaccttcctctctactgccttccactaccaccatttaaatacacaaaactgtcactgtgtgagatatggccattatgttgctagctcttctgtgatgtttataaaatatgtcaactccctatagtgaattggcattgttttgctctcccacttcctatcaacgaaaaaaagcaaatgcccccaagtaaataatctaactcattaaccctcactgcattacagagatggaaaaatttatcaataataagagctgagcatcaggggaagatgctttatcttaccccaaacctggagactcatcccggggggcaccaggtctctgcagtagctcccatctccttgcccatactcttactctccacctgcaccattcatctgaataaattagcctcactgagaggaagatgacagcaaagagcgcacctgcaatgtagtgtgactgccgcagcttagtaaggggtttccagggaagcggtttctaaaacacaggggaggagaattgtcagggtttggctccttgtgaaatttgcctgtcagaacagatgatgcgtttgggcataacacactccagtttgttcttctggcagtttctcttctcaatttcaaggctttcacagttttgctgcaacttatccttttaaggggctcttcttctcccatttctccattgactgttggtccagagaggtgagagattatgttgaaattgtctgcttaggactgatttgctgtagaatcaggccaatcacaacaacgggcccctccagcatctgccctcactgcccttgttttcagggcaccatccccccatcctccggtttgtctggaattggagggggtctgggggactgatgttccacaagccatgatcagactagttcagagggcagtgggctttttctggaaatg

SEQ ID NO: 81 - DNA, 2288 bp, Homo sapiens
atcctaagaggcagggatcttaaggacaaggaagagaagagagagagggagggatctttgatctctttctctggtaatcttaatgcataattttactaatacatgttctcaattcattcatattattaagctcttcctgcagttgatatctgagcagagtaagatttgtatttccatttttacttttttgaaagagaatatatggacagattattagtacaatttgggcactgtggttttaagaatatctgagtaaaataacaatatgaaataataaacagaagctctaacgtcaggtaacaaatagacagcaagaaaggttttgcaccatcctcttacggcctagagagttgacaagttgcttgtagttttaaaaaaataataaagtatacccttctggtatatcatcaagagcttaagaatcttggctttcatatttaaaatgcttttggggagacatatattaaaattttagccaagatgatagacatgtctcaattatatatgtgtgtgtatgtttttaaagctaaaaacattacttttagatccctagaatgaaaatttttttctcatctatgcaattcccatatggtttttttttaaatcatattttattcattttctccctttagcaattttcattttatttctcataatttgaacagagacagttctcatacatgatcagatgctttttttttcttcttaccatcatttatgcatgacataggtaatgtgactaatttctccagttgattcaagaaactcattactttgcctcaaattatatgtaaaatatttgttttacttaggttacagttatcagaaaggtagtttttttcttctattaaaatataacattgtgaaagaaaataaaatttatgctattctttgctttgtttttataaatgaatttttcatagaatttacagtatattcaaaggaagaaagataaaattattggtcatcatttgtaccttagaagtacaagaatttaagtaaaagaaatgttcatttttgttttaaaatttgttttccatgtgaagtttttattgagccaactttcatacatatcttgctagcctaaagtctaaatatttgtgttggcatcagaaaaacaaatgaggcagaattgctatgtgtggttgatcttcagataaattgactgatcacagttatttttgtatcagtctatgttattaggaaaaattgtttagttgttttctcccctgattaatggtgatattcaagtatgatacaaaaagaattgtaccaccaaatatttttgtgaggtctgctgttttccatattcattttatgctactgcctttaagaaagaactagtgtatccttgaaatagcacaaaaatgttttaaaattcataattgcaaaacaaatctgtgactaacttaatgtcttcagatctaaagggtgtaaaaatattgatacttcaatatttcacttgctgccaggaaaaacaaaattctcaatcttttgtaaatgggaggaggacttttgcatacatttttactctttaaataacgacaacgacacttatactgtcataataacaattatgtatttctttgtggttttaattttttttgtaattttacataaaacagttattttctatttttacgcagataaatatttgtgcataaaatgtaaaaatagtaaaatgagaaaaataaaactattatacagtatgtttctgtgttgcttaaaagttttttttcctgaaaacaaaatcttaaatccccaggatattttgttggatagtaatctgacagtccacttatgatacgttgtacataggattccgatgcatttttaaacttaaaagctgtcaatttgggaagaacatatttcactgaactaaaattagtaggttcatctctttgaggaaattaatgaaattccatctacaaagccaagttgttttagaatagtaacagatgaagctgtcagaaggcaagctgatgattgctaaattgtaaacctttcataaagcctttttttttaacaaacaaaaaatcacctgttcatgttggctatcagcaggttgcttcagccagaatcagaatatagaagaatggaaagggttaggaaaaagtgattcatgcctgccttcatggtgaagcaatgatgaaagtttgattgacatgcttaaataggaagttatggttagaaataaatggctttaaaaatacacagtgtgattgtatctagttcgaagcaatcaaaaaccatcagccaggacgctagtgaggtatgtttgttctccc

1. An isolated polynucleotide consisting of the nucleotide sequence comprised between nucleotide 26,064,934 and nucleotide 26,642,665 of human chromosome 21 (NCBI35:21:26064934:26642665:1) [SEQ ID NO: 74], or a fragment of said polynucleotide comprising the complete human APP gene (hAPP) together with the regulatory sequences thereof.

2. Polynucleotide according to claim 1, wherein said complete hAPP gene together with the regulatory sequences thereof is comprised between nucleotide 26,174,733 and nucleotide 26,464,809 of human chromosome 21 (NCBI35:21:26174733:26464809:1) [SEQ ID NO: 75].

3. Polynucleotide according to claim 1, consisting of the nucleotide sequence comprised between nucleotide 26,064,934 and nucleotide 26,573,344 of human chromosome 21 (NCBI35:21:26064934:26573344:1) [SEQ ID NO: 76].

4. Polynucleotide according to claim 1, wherein said hAPP gene is flanked at its 5′ end (in relation to the origin and the direction of the APP gene transcription) by a first nucleotide sequence and at its 3′ end (in relation to the end and the direction of the APP gene transcription) by a second nucleotide sequence, wherein:
said first nucleotide sequence comprises the nucleotide sequence comprised between nucleotide 26,464,810 and nucleotide 26,642,665 of human chromosome 21 (NCBI35:21:26464810:26642665:1) [SEQ ID NO: 77], or a fragment thereof comprising at least one unique sequence, and
said second nucleotide sequence comprises consists by the nucleotide sequence comprised between nucleotide 26,064,934 and nucleotide 26,174,732 of human chromosome 21 (NCBI35:21:26064934:26174732:1) [SEQ ID NO: 78], or a fragment thereof comprising at least one unique sequence.

5. Polynucleotide according to claim 4, wherein:
said first nucleotide sequence comprises the nucleotide sequence comprised between nucleotide 26,464,810 and nucleotide 26,573,344 of human chromosome 21 (NCBI35:21:26464810:26573344:1) [SEQ ID NO: 79], or a fragment thereof comprising at least one unique sequence, and
said second nucleotide sequence comprises the nucleotide sequence comprised between nucleotide 26,064,934 and nucleotide 26,174,732 of human chromosome 21 (NCBI35:21:26064934:26174732:1) [SEQ ID NO: 78], or a fragment thereof comprising at least one unique sequence.

6. Polynucleotide according to claim 4, wherein said first nucleotide sequence comprises the nucleotide sequence comprised between nucleotide 26,571,876 and nucleotide 26,573,344 of human chromosome 21 (NCBI35:21:26571876:26573344:1)[SEQ ID NO: 80].

7. Polynucleotide according to claim 4, wherein said second nucleotide sequence comprises the nucleotide sequence comprised between nucleotide 26,064,934 and nucleotide 26,067,221 of human chromosome 21 (NCBI35:21:26064934:26067221:1) [SEQ ID NO: 81].

8. A vector comprising a polynucleotide according to claim 1.

9. Vector according to claim 8, selected from the group formed by a YAC (yeast artificial chromosome), a BAC (bacterial artificial chromosome) or a PAC (P1-derived artificial chromosome).

10. Vector according to claim 8, wherein said polynucleotide is flanked at one of its ends by a third nucleotide sequence and at the other opposite end by a fourth nucleotide sequence, wherein:
said third nucleotide sequence comprises (i) a telomere functional in yeast cells and at least (ii) one auxotrophic selection marker, and
said fourth nucleotide sequence comprises (i) a centromere functional in yeast cells, a telomere functional in yeast cells and at least one auxotrophic selection marker.

11. Vector according to claim 10, wherein said auxotrophic selection marker is selected from the group comprised between TRP1, LEU2, LYS2, HIS3, HIS5, TRP1, URA3.

12. A cell comprising a polynucleotide according to claim 1.

13. A transgenic non-human animal containing a polynucleotide according to claim 1 inserted in the genome thereof.

14. Transgenic animal according to claim 13, wherein said animal is a mammal selected from the group consisting of a mouse and a rat.

15. Transgenic animal according to claim 13, the genome of which further contains one or more molecular markers of Alzheimer's disease.

16. Transgenic animal according to claim 15, wherein said molecular markers of Alzheimer's disease are selected from the group consisting of the PS1 genes, the PS2 genes and the epsilon4 (ε4) allele of the APOE gene.

17. A method of studying Alzheimer's disease using a transgenic non-human animal according to claim 13.

18. (canceled)

19. (canceled)

20. Transgenic animal according to claim 13, wherein said animal expresses only the hAPP gene.

21. A method for identifying a potentially useful compound for the treatment and/or prevention of Alzheimer's disease, comprising the steps of:
a) administering a candidate compound to a transgenic non-human animal according to claim 13;
b) determining the expression pattern of the hAPP gene and/or the hAPP protein production and/or the β-amyloid (Aβ) peptide production in said transgenic non-human animal of step (a), and
c) selecting the candidate compound causing (i) a decrease in the hAPP gene expression levels in nervous tissue, (ii) a decrease of hAPP protein production and/or accumulation and/or (iii) a decrease in Aβ peptide production and/or accumulation in said transgenic non-human animal

22. The offspring of a transgenic non-human animal endogenously expressing the human APP gene with an expression pattern similar or equivalent to the expression pattern of said gene in humans.

23. A cell comprising a vector according to claim 8.
